United States Patent Application Publication US 2025/0205292 A1 - sequence listing, part 19

SEQ ID NO: 30 - DNA, 2321242 bp, Bifidobacterium breve
  source 1..2321242: mol_type = genomic DNA
atggttgatgtttccggtgaccccacaatcgaagctgcccatatttggtcaaacacacttacccttcttaagcgcaacagcactctgaccgcacgagagaagggatggcttgagggaatagttcctgaaggtgtgttcggctcaaccatcgtgctgtgtgtggataacaatgacacactgcaggccattcaaggcaatctcaacgaatcattgttgcaagcactgcacaccgcaaccggtgagaacatgttccctgcgttcaaagtagtgccgcgcagtgaaccgcaaccggtctccccttatccaacgaatgcttcgccgactctcactgattttggcaaggaaccgtatggcgcgccggaacctgtgattcctgctgttgaacagcagttctctgtgccgcagcaaaaaatgaatcgcgatccggaaactcatctcaataagagtttcactttcgattcgtttgttcccggtgactctaatcgcttcgcgcgaactgttgcattggctgtggcagagggatcaggccaggatttcaatccgttgtgtatttatggcggttccggtttgggcaaaacacatttgctcaacgccatcggcaattacgccttggtaaaggatcccggcctgaaggttcgatacgtcacttccgaggaatttaccaacgactttattgacgctctgcaaaataccaatcagagtcaaggccagatagcggaattcaaccgtcgatatcgccaggtagatgtgctgcttattgatgatattcagttcctaggcggcaaggaagccactctggatcagtttttccatacgttcaattcgctgcatcaagcgaataaacgcattgtcattgcgtctgatgtggctccaaaaaacctgaaaggttttgaggctcgactgatttcccgctttgaatccggcctgaccgtggatgtcaagccgccggatttggagacacgtatcgccattctgcgcatgattgccgcaatgaacggatcgaagattcccaatgacgttctggatcttattgccgaacgtttcacggagaatatacgtgaattggaaggcgcgctgacccgcgtcaccgccgttgcctcgctgagcaaccagccggtgacccgcgctttggcggagcaaacgcttcaagacttctttaccaccgatgtggaaatcaagcccaccgacatcatcggtcaagtggcaaagtacttccacttgacgtttgaggatatcgtcggctcatcacgtaccaagaacgtggtgattccccgacagatagccatgtatctcgctcgcgagatgaccagcatgagcctgatggatatcggcgaggtgtttggaggtcgcgatcacactacggtaatgcatgcttgcacccgtattggcgacaaaatgcagcagaaacaggaaatctataactacgttatggaactgactgtgcgtttgaagcagaacgcagactgagtatgcctatggcttcctttacgggagccattttttatatctgcgcatatccgagagaatcgttcctgaagaccgatttcggcactttttcaaatcgagccagaaaaaagtgccgaaaaccgtcctcagaatcgattctcctcgccgataatcatgttcaacacgccgtacaaagacccaataatcatgaaagttatccacatagttgttcacaaatgtgggcaaactcggcggataactcgtggattacccactatttttcggtggaaaattggtgcataacacggccttctgtgtggaaaacttaacaattgactttttcctgtggataagtcgcctatttatccacatgctatacagaagttatccacaacactccccagtggataagccgttaccgcagtagccctccatccacttatccacactatccaccgcacttattacgacgattacttacttgcatacataagagcaccgtcatggtgataatcggccgcatcaagcacgcaagcaaaagaaccaaccaaccgctagaatgttcttcagcaaaaccgacgaagggaacaacctgacatgaaagtcgaaatcgataccgccgcattggctgatgccgtggcctggacctcccgcgtcattgacgctcgtccttccaacccaattctcgctggcgtaaaacttgaagccattgacggcaccctgcagttctctgcattcaattacgagatttccgctcgtcaccacatcgaagctggtgttgatgaagtcggttccgctctggttctgggcaagcttctggctgatatcaccaagtcgctgcgttccgaaaaaacctacctgaccaccgatggctccacgctagccatcacctctggcaagtcgaagttcacgttgcagctcatgcccgatgccgaataccctgatttgccggttgtgccgcctatgctcggccaagttgatgcccaaactttcgtccaagccgtgaaccaggcatccgtcgccgtctcccgcgaagaaaaccgtccggtactgaccggcgtgcgcatgcagttccaggacgacaaagtcatcatgacctccaccgaccgcttccgtttggctcgtgccgcgttcacctggaccccgcaagacgccaatgtggacaccatcaccctagtgcgtggctctttgctcaaggacgtggctcgttctctggacgaacaccagaacatccgccttgatttcgatgccgataaccccacgttgctcggttttgaaaatgccggtcgcgtatccacttcgcagctcatcgacggtgagttcccggctgtcgaccgcttgttcgccgatgaatacccgattcaggccgtagtgaacaagcaagatctgcttgacgccattagccgtgtggctctagtcgccgagcgcaacgccccgatccgcatgatgttcaccggccaggagctcgccttgtccgccggttccgccgacgaagcgcaagccaatgaaacactcgatatcgatatggatggcgacgaaatcaccgtggcattcaacccgtcctacctcaaggaaggtttgtccgcgattgccgagccgtttgtacgcatcaagatgaccacgccggtcaagccggtggaattcaacgggcagcaggaagccgattccgatgaatcgatggactaccgctacctgctggtgccgatgcgctttaacagctgacgcagaatctctcacatactgcacatgcatatctcccgtcttgcactcgaccactaccgctcatggagccaggtagtggtcgatttcgtaccaggagtcaatatcctggtcggcaagaacggcttgggcaaaaccaatctggtggaggccgttgaagtgctctccaccggagctagtcatcgtgcctccagcatgctgccgcttatcgaacgcggccaaaccactgccactattcgcgccaacgtagtagacgacgatgggcaaagcactacgtatgaggcatcgattcatgctcgcggcgcgaatcgggcacgcatcaattcaggaacctcgctctatttacgcgatatcatcggccgcattcccagcgtttcgtttactcctgaagaccagagattggtatcgggtgatcctggtgcccggcgaacgttgctcaaccaagccggagccctgctggaacccggctatatgcagtcgttgcatcaattcacacgcatcggcaagcagcgcgccacgttgctgaagcagcttggcgccagcgcgaatactgggcaaccggtggatgccgtattaagcggtttggaaatatggaccggacagtttatcgaagcaggtgtggaactgacccgtatgcgtgcgagagtcatcgacttgctggctgagccgtttgccgcgctgtacgctgagttgactggcaacgatgacaccgtcagcctgacgtatgcgccgtcatttgacgaagtgctgatgcaagacgatccacgattgagcatcagtgaacatttccagcgcatctaccctggagaagtggctcgaggcgtcaatcttatcggccctcaacgtgacgatttgaccctgaatcttgctgatatgccagcccgcgaattcgcctcgaacggcgagatgtggaccatggcgctggccttgaaaatggcgctattccaagtgatacgccagagattgggccttaagcccatcgttatccttgatgatgtgttcgcccagcttgacgacaaccgtcgtacccagattctggattttgcgcgccggcaagatcaggtgcttatcaccgtggcgtcagaaggcgatgtgcccacgcatgaatcggacaatgtgcttgatattgcgcaattgatgccatccgccgcgcagtctgggggcgggagcgaggcacaatcatgaagcctcccattgcctgtcagctgcatgtggacgaaaccaaactacccgcagaaatatttgaacgtctctctcaccgcggggcgatactgaaagaccgacgccgcagacgcgaggaagcctttgagaacttcggcaagcccggccgtgatccggccgagttgggcagcgtgatgagctcaatcgcaggcggtggcgtatgggctgcgaacatgaaattggcgcaattgcgcaaccattgggatcaggtggtaggcgaggcaatcgccaatcattcggcagtcgctgatttcaccgatggagtcttgactattcgtgccgaatccacagtgtgggccactcaactgacctatttgattccgcaattgaccgataccattcgcaggaatctcaaaggactgaccatcaacgaaatcagagtcaccggtccggcggtcggatacagccggaaatgggcccggcgtcgataacaccctagaataggggaaattcgtagaagccccgctatggcgctcgtcgtagtagacgagtagaatcacatgcaatatggtcaaatggctggaagagccctttacgggcctcataagccatatcgcctctgcaaatgaccttcattacagaggttgaccccgtagtcacggaaggaagcctgttggcagaagaaaccagcaaagaggagcagctgaaggcggctgcggaacgcatcaacaatgcggaattgaccgaaggcgagcttgacgaatccatggcgcccgagcattatgaggcctctgaccttcgagtgcttgaaggtcttgaagccgtgcgtatccgtccaggtatgtacatcggctccaccggtccgcgtggtttgcaccacttggtctacgaaatcgtcgataactcggtcgatgaggcgctggctggatatgccagccatattgaagtcactatcctgccggacaacggtattcgcgtggtggacgatggccgaggcattccggttgatgaggttcctggcgaaggcgtctccggtgttgaaaccgtgatgaccaagctgcacgccggcggcaagtttggtggcggcggctacgcggtgtccggcggtctgcacggcgtgggcatctccgtggtgaacgccctgtccactcacgtggacatcgaagtgcgccgtcagggcttccactggacccagacctatgtcgaccaacatccggttgcgccgctgaagcagggtgagccgatggccgagggcgaatccaccggtacatccgtgaccttctgggccgacccgaagatctttgaaaccaccatttatgatttcgagacgttgcgttcccgcttccaacagatggccttcttgaacaagggcctgaagcttagcctgaccgacgaacgcgtcactgaccaggccggcgacgaagtggccggcgacgccgaaggcgagcccggtgagaagcaccaaaccgtcacctaccagtacctcaacggcatcaaggattacgtcgactacctggtcaaggtgcgcaaggccacaccggtggaagaggatgtcatcagcttcgaggccgaagacctcaagctcggcatttccgctgaactcgccatgcagtggactaccgcctactccgaggctgtgcacacctttgcgaacacgatttccaccaccgaaggcggcacccacgaggagggcttccgtgcggcactgacctcgctggtcaaccgttacgcgcgtgacaaggccatcctcaaagacaaggacgagaacctgtccggcgacgacgtgcgcgaaggcctgacggccgtgatctccgtcaaactcaccaacccgcagttcgaaggccagaccaagaccaagctcggcaactccgaagccaagacctttgtgcagcgcgtgatgaccgacaagctcggcgactggttcgacgcccaccctgccgaggccaagaacatcattcagaaggccatcgaagcctcccgtgcccgtctggccgccaagaaggcccgcgaaaacacccgccgcaagtccatcttcgagtccgccggcatgcccgacaagctcaaggactgccagtcctccaacccggaagagtgcgagctgttcatcgtggagggtgattccgcaggcggttccgccattcagggccgcaacccgatcacacaggccatccttccgctgcgaggcaagatcctcaacaccgaacgtgccagcctggaccgtatgatgaagtccgacaccatcgaatcgctgatcaccgcggtcggtggtggctacggcgaagacttcgacatctccaaggtgcgctatcacaaggtcatcatcatggccgatgccgatgtggacggtgcgcatatcgccaccctgaacctgacgctgttcttccgttacatgcgtccgatgattaccgccggttacgtgtacgtggccatgccgccgctgtaccgcttgaagtggaccaagggtccgcacgacttcgtgtacaccgacgccgagcgtgaccgtgtgcttgccgaaggcaaggccaacggccgccagctgcccaagggcgaaggcattcagcgctacaagggtctgggcgagatgagctatcaggagctgtgggaaaccaccatggatcccgaacaccgcattctgaagcaggtacacatcgaggatgcggccgcagccgacgagaccttctcgatgctgatgggcgacgaagtggaaccgcgccgcctcttcatccagcgcaacgccaagaacgtgcgttggatcgacgcgtaaaggaatcctccgcaagcggaggacacaattccttggctcccctctttgaggggagctgtcgaacgcagtgagactgaggggagcagtcactgcgacatggactcccctcagtcagcttcgctgacagctccccctcagagaggggagccagataggactaaaggaacggtataagtggcagacgaaacaaacaacaccggtgacgaacagttcaccccggatggctcgatggagccgttgagcccgcaggaagcggacaccactgactacggtctgatggaaagcggcgaacgcatccagcgcaaggatttgcagcaggagatgcgcgaatcctacctagcctacgccctttccgtcatagtggaacgtgctctgccggacgtgcgcgacggcatgaaacccgtgcatcgccgtgtgatctatgcgatgtacgacggcggctatcgccccgaccgcggctacaacaagtgctcccgcgtggtcggcgacgtcatgggtaaataccatccgcacggcgacttcgccatctatgacactttggtgcgcatggcccagtcctggtcgatgcgcaacctgctcgtcgacggtcagggtaactttggttcccctggcgacgaccctgccgccgccatgcgttacaccgaatgccgtatggccccgctggccatggaaatggtgcgcgacatcgacaaggacaccgtcgacttcgtgcccaactacgacggcaaaacccaggaaccgactgtattgccggcccgcttcccgaacctgctggtcaacggctccgccggcatcgccgtgggtatggccaccaatattccgccgcacaacatgcgcgaggtggccgaaggcgtgcactgggcgcttgagcatccggacgccagccgcgaagagctgctggaaaacctgattcgcatcatcaagggaccggacttccccaccggcgccaccatcctcggtcacaagggcatcgaacaggcctaccgcaccggccgtggcctcatcactatgcgtgccgtggtcaacactgaggagatcaacggccgcatgtgcctggtggtcaccgagctgccgtaccaggtcaacccggatcgtctggtcgtctcaattcgtgaggccgtgcgcgacggcaagattcagggcatcgccgacatgcgcgacgaaacctccggccgtacaggccagcgcctcgtattggtgctgaagcgtgacgccgtgccgaaggtggtgctgaacaacctgtacaagcactcccagctgcagcagaccttcggtgccaacatgctggccctggtcgacggcgtgccgcgcacgctgagcctggacgccttcatccgccattgggtgaaccaccagctcgacgtgatcgcccgccgtaccgcatacctgaagcgtgaagccgaggaacgcgaccacatcctgcagggctacctcaaggctctcgacatgctggacgaggtcatcgccctgatccgagcctccgaagacaccgataccgcccgtaccggtttgatggagcttctggacatcgatcaggtgcaggccgatgccatcctagccatgcagctgcgcacgctgacccgcatgaaccgcgacaagatcgtggccgaacacgaggaattgcagcgcaagatcgccgactacatcgacattcttgccaagccggaacgccaacgcaagatcatcggtgacgaactcgacgagattgtgggcaagtacggtgacgaacgccgtaccaagatcctgccgttctccggtgagatgaacgtcgaagacctgatcgccgaagagaacgtggtggtcaccgtgacccactccggcttcatcaagcgcaccaaggccgacgaataccgcgcccagcaccgtggcggcaagggcatcaagggcaccaagctgcgcgaggacgacgtggtggatcacttcttcctgacctccacgcacaactggctgctgttcttcacgaacaagggtcgcgtctaccgcatcaaggcctatgagctgcccgagggttctcgtgattccaagggccagcacgtggctaacctgctgcaattcgcgcccgacgagtccatccaggccgtgctgtccatcccgaactacgaggtggccaagtatctggtgctcgccacccgttccggcaaggtcaagaagaccccgctggccgagtacgactccccgcgtcagggcggcctcatcgccgtgcgcctgatggccgacgagaacggcgagaatgccgacgagctgatcggtgccgcgctgtgcaacgccgaggatgacatcatcttggtctccaagctcggcatgagcctgaagttccaggccaacgatgagcaactgcgcccgatgggtcgtcagactgccggtgtgcagggcatgaagttccgcgagggcgacgagctactggccatggatgtggtatggggcgactccgacaaggatctgttcgtagtgaccaacgaaggcttcgccaagcgtacggccatcagcgaataccgcctgcagggccgtaacggcctgggcatcaaggccgtgcagctggtcgaaggccgcggctctctggtcggcgcgctcgtggtgtccgaagacgatcaggtcatggccatcatgaagtccggcaaggtgattcgttccaacgtggacgaggtcaagcgcaccgggcgcaacacccagggtgttaccttcgccaagcctgataagggcgacgaaatcctttccatcgcacgcaacgaagaaaaggatgaccccgaagaggaggtcgccgacaacggcactgccgaagcaggccagtcccccgccgaaccggtgaacgagtccaacgagaccgcacaatccggtgagaatgtgaacaacgtggacgaggcgtgagccgagtcccgaaaggctggtagcctcactaacagcagaggctaccagcaggctcttaaggagaaacgatgaacgatcagttcgacaacaacgagtccgaggtgattcagcccaatatcgacaatacggtgaatgatgtggtgacgcctgaacccgttcgggaggcaccgcgcaaggcccgttctgtttccagcgagccggaagaggttaccagcagcccgaagactgttcgtccggcagctcgtcgcagcactccacgcgcccgccgcatgagcctgtccctgacccgtgtggatgcatggtccgtggccaaggtgacattcatgctttcgattgccggcgccattatccagattgtcgccgcagccgtcgtctggctgctgctcgatttggtcggtgtgttcggtcagattacccagattgtttcttccactggcttggatgctggcggtcttgatctgaagaatgtgctgtccctgaccaccgtggtgtctggtgtgaccatcttctccattatcgaagtggtgattttcaccattctggccaccattattgcgttgatttacaacgtggtcagctcgctggtcggtggcgtgcacgtcaccctcggcgatgactgagttttagctataccaacaaaactcccctcaatccgattcatggactgaggggagtttcgcatattcatagccgatcagtgcttggtgggcacgaagctttcgcgggctaccagcttggtcgagatcatggtgtggcaggtgatgtcatcattgaaactgatcgactgggaaagcatcagcagcgcgtttctggctaatgccgtctgatcgatggcatacgtggtcagcggcggtgaaatgtactgggcgatggactggttgttgatgctgatgatgctgacatcgcgcggcaccagtatgccggctttggtaaaggcctgaatcacgcccacggccagggaatcagtggccacgataaagcagtcaggcatattgctgctgagcttggccacaatcgtttcgccgtgcttgcggccggttttcacgctgacctggccgccggtaaatatcagtcctgcggtttccaggccaaggcgttcgcaccagtcgcggtatgccatcgtacggatgtcttcggggtactcgtaggtgcccatcatgcggccttcgccgccgataaatccgattctggtcatgccgcgggctctggcttcgcttaaggcgtccagtatggtttgcggcagatccggctgcacggagctgaacaggttcggagccgggttcacatcgataaacacaccgtggggtagtacttcgtgaagccgctccaagctctcataggaatgcagctcagggccaatggatacgaagccgtcatactgggtgctgttgtcgatgagcttattgatatcggtgtagaacgacagggtgatatgcatctgctgcgctgtggagagcaaggtgctgcgcaattcgctgtaataggcattgctgagctcttcatcactgggaatggcgtccagcacggcgatatcgtgcggagccaccagtcgcctgtcttgcgtttcgtagccaagttcctcgcagacctgcagaatcttgcggcgggtctcctccttgacggagagcgtcggatcgccgttgagcaggcgtgacacggttgccggcgagaatccggcccgttgagcgatttctctgatagtgaccatgcgtatgcccgatatgttctttctgcaccgtttgcgtactatgtacttgttcctgcattactacccgtcattaggtaattggtaatgtatgtttacctgatacctatcgtagcgcacatcaatcggagtgcggcaaagatgtgcgccagttggcggaaaaacaacacaccgcccgaatgaatagcatcattcgggcggtgttgtgcggcaatgtctgcttgctgttgagtcacattcggctaacgacattacctatgcgttacttggtttaccgagctgcggactccttgccgagcagcgcggccttggcgatgtcctcgccgtacttggcggcatcggactcatcgtgcaggttggcttcgatcttggccacgatacgggcgtgagccttttcgtcgatcttcacgaagaaggcgaagatcagaaagccgatgatgatgaatgccagcggcatccagaaggcgaagccctcgaaggtggtgatgttggcctgggtcatgtcggcggcggtggtcttgtcgacgccggcgaacagcgcgttggtggcaaagaccatgaagtaggtgctcagtgcgttgtaggacagcgcctggccgaagttaccgaatgcaaaggcggcaagacggcctttattaagctttttctggggttcggcagttgatgacgacatcagtgtttcctcatttcccgtgatactgactgcggggcggccggcgttggcccttatttctgtcgttgaacaagatatgcgttacctatgcaaagtaaaaccataactaaatgcattatctaatagtgatactaggaatgtctgcaatatgattgcggtgacgattactgctccttggtatctagctcgtataggtctgcgtcagactgtgcggtgatgcaccatgtgatactgccgagcttgattttcatcgatatgcaggttatatttagtaaacagtttatttactagttcagtcacggtgccgtgacgaattcgatgcaaggaaaggcgaaaaccattatgaccaacttgcagtcagctcagcagttctctcaggcctggcttaccgacccgcgtgtgtttgccgtcaaccggcttgccgcgcattccagccacaagttctatgatcacgctccccagtgcggcgaagccatggatctcaagcagagtctggacggtcaatggcgcgtgcagatggtggatctcgctgatttggcggacaacgagcttgctgaggcggtgtttgctcagccgggatacgacgatgccggcttctcccccatcgaagttccctccgcattggaggccaagggattcctgaatcatcagtatgtcaaccagcagtacccgtggtccggccatgagagcccagtggcaccggatgtgccgaagcataaccacgtggcgctgtaccgtcatgagttctctttggaacccaaggcagctgccgtgttggaggccaataagactgctgcggatgatgctgccaaacgtcgcgttacgttgacattccaaggcgcggccacggctattgccgtctggctcaatggcgctttcatcggctatgccgaggattcctttactcccagcgagttcgacgtgactgatgttctgcgtgacggcgtcaatacgttggccgtggcttgctttgaattctcgtccgccagctggctcgaggaccaggacttctggcgtctgcacggcatcttccgttccgtggagctggaagcccagccgttggttcatgtgaacgacctgcgcgtgctggccgattacgaccacaccactggcgaaggttcgttggacgtcaccgcactggtgcgcaatgctggcactgctgccgccgttgccgccacagtgctcgatgctgccggcaacactgtctggcacggcaagctgactgccggagctgatgccgagacgttgaccgtgaaggccaatgtcggcaaggtcagcccgtggagtgccgaagagcccacgctgtacaccctgcaggtggtgacaaccgatgccgccggtcaggtaatcgaagcagtgctgcagcgcatcggcttccgtcacttcgccatcgaagacggcctgatgaagctcaacggcaagcgcattgtgttcaagggcgtcgaccgccacgaattcgatgcccgcaccggccgcacgattgccgaagcggacatgattgaggacatccactcgttcaagcgcctcaacatcaacgccgtgcgcacctcccactaccccaacgagacccgctggtacgagctgtgcgacgagtacggcatctatgtgctggacgaaacgaacctcgaaacccacggcagctggaccgatccgggcgatgtgttccagcccgcacgcgccatcccgggcagcaaggacgaatggcgcgccgcctgtgtggaccgcaccgcaagcatggtgcgccgcgactacaaccacccgagcgtggtgatctggtcgctgggcaacgaggcgttcggcggtgacgtgttctactcgatgcgcgacttcgtgcacgagaacgacccgttccgcccggtgcactacgagggcacgttcaacgaccccgaattcagcgccgccacagacatcatgagccgtatgtatgccaagcctgatgagatcgtcaagctatacctcggcgaggacggcaagaagccgtacatttcctgcgaatacagccactcgatgggcaactccaccggcggcctgcacctgtacaccgaactggaacgctacccgctctaccagggcggcttcatctgggattacgtcgatcaggccttgtggcaggactgcggcgacggcaccgagcgcctggcctacggcggcgacttcgaagaccgtccgaacgattacgagttcagcggcgatggcgtcatgttcgccgatcgcaccccctcccccaaggctcaggaagtcaagcagttgtatgccaatgtgaagctcgtgccggacgagtccggtgtgaccatcaccaacgacaacctgtttatttccactgcctccagcctgttcaccgcgcgcgtgttggtggacggtgtggagcgttggcatgccaactaccgcttcgatgtgcctgccggcgagaccgtgcgtgagccgatcgccttcccgaaggtcaccgatttggtggctctgtccggcagcgccgaagtgacctacgaagtcgaccagcgtctggctgaggccactgactgggctccggccggctacgagctgaccttcggccagtatgtcgccgcggtttcgttcgatgatggtgccgcggatgccgttgttgccggcgacgccgaagtggcagccgatggcttcaacgccggtattcacaccgacttcggcgaagtgctgctctccaagacgcagggtggcatggtctccttcaagcgcgacggccgcgaaatggtgattcgccgcccgaacctgaccaccttccgtgcgctgaccgacaatgatcgcggtaacggttccggtttcgagcgcgcccagtggatggccgccggacgctatgcccgtgtgaccggtacgtcggtcgaggagactgccgatggcaagggattgaaggccacctacagctatgaactggccgatgccaagcacacgccagtcaccgtgcactataaagtcgacgtcgcactgcgcgtgcacctgacggtcgagtacccgggcgaggcggatgccgccacgctgccggcatttggtctcgaatggatcctgcccaagcagtacgaccgcctgcgtttctacggtctgggaccggaggaaacctatgccgaccgtctgcacggcgccaagttgggcatcttctcccgtaccgctgccgaggattgcgcgccgtacctgctgccgcaggaaaccggcaaccatgagcaggtgcgttgggcggaaatcaccgacgaatacggccacggcatgcgcgtgaccgcagccggcggcacccgattcgccaccagcctgctgccgtacagctcgctgatgctcgaggatgctctgcaccagaatgagctgccgaagccgcgccacaccttcctgcgtctgctggccgcccagatgggcgtcggtggcgacgacacgtggggtgctccggttcacgacgagttccaggtgccggccgaccagccgctcaagctggatgtgacactcgaactaatctgagttgccgcggcgctcctgttgaggagttgccgttgtagacctgtagatcactgagggcggttatcgggattccggtaaccgccctcagcgtcaataatttaggaaataagcggcttcgtcctaaaatcttgtcactgactctgtctcagtgacagaaatttaggggcatggggctgatttcctgaaatcctgtcactgagttgccgcgaacgacaaaaatttaggacgagtgggctattttcctaaatttctgacgctgtcggaaaaacaattggccatctgcgggaggctcatagttgggcacgtgtcgctgccggggagttgatcggtcatccatggagtctcatggtcgcggtggtgactcgcattgcgattttctccaccttcagaatgatgtcgtgtttactggcggcttcgtatgatgacgaacgatgcttaagtatttgggttatttttcgacgtcgttcactattgcaatcgtaatgtggccgattctttcggccgtacttactttgccgattctggctgggctgtaccatcgccaccatcgtatgaagttgttgtctgcgggagccgcatatctgacggtactgtatgtgctcggtttgattgcattcacactgtatccgatgccggatgacccggaagcgttctgcgcggcgaatgccggccagttcgcaccacagcttgacccgctgcgtttcatctcagacatccaaaacggcggattgagcggcatactgcagctggtaatgaacgtggtgctgttcatgccgcttggtttcgtgctcacccggtggctgcgctggcgttggtgggcggtgctgattggcggattcgccgtatcgttgttcatcgaaagctcgcagctcagcggtttctggggcctctacccgtgcgcctaccgtcagttcgatgtcaacgatctgatgaccaatacgttgggtacgatggcgggcctcgccgtggccgtgttgttcggcaagtgggtgccgatggcccacatgcccgaacgcagcgagtataatgaacaccctggcgcggtgcatcgtctggtgacgttcatcatcgatatggtttttgtggccttggtatacgtcccgctcaccttgttggtgacgttcttgttctactgggcggctgagcctttgcagaacggtgatttcatgctgttcggtgggcatctgaccgttggcgttggttggctgaacttccttgcgccaataggagccagtctggcgttcctcattttcgagttcctgattccgctggggcataagggccgcacgcttggcggcatgtatacgcacatgaccattgaaaccaagccgcgcaagggaatcgcgcgcgccgtgttctacattctgcgcacgctgattatgggcgcaatggtggttatggtcattatcggattcgggcacaacgcgcatatcatgcgctacaccttctacggctttgtcatcctgttcctcttcgcggtgttcgcccatcgcatgccttgggactttgtgcccggatcttcggtggcgccggccccggctgtgcccgtgtatggagcggcggatgtcgctgcggcgccggctgagtcatctgccgcgaatgcacattcggacaaagagggtgcggcaaccgtggcgggtgatgatgctgtacctggcgcgcccgattcggatgctgcgtcgaagggtgcggtgaatacgaagaatacgggtgatgcgcgtgccgaaggcgatgaatccgccgccacaaatccgaatactgtgggacaagatgaaaaataggccgatttttggctgttgtcccattcccatagttgtggcctgatatggcataatcgtaggaatggcggtattccaacgattctgatttcttgtgttgggacaatcgaacagtcaatcgattgatgctgatgttgtcccacagtctcgtgggacaacatcgcaaaaacagcgattatcgtatgttgtcccacgctgaatagcatcggcccctgcccttcatgagtggaaggacgggggccgattggtttattcgcgattgcgatcgcggcagtctgtcagaggatcacagcacgccctgggcgaccatggcgttggccaccttgacgaagcctgcgatgttggcgccagccatcaggtcgccttcctcgccgtattccttggaggcagccagggagttggcgacgatggactccatgatggactttagcttggcgtcgacctcctcgaaggtccagctcaggcggtagctgttctggctcatctccaggccggagacggccacgccaccggcgttggcagccttggccgggccgtacagcaggccggcgttcttgtagacctcaatggcctccggagtggacggcatgttggcgccttcgcacaccaccttgcagccgttggcaacaagagccttggcggactcctcgttgatctcgttctgggtggcgcacggcaaggcgatgtcgcacttgacggtccacacgccggagcaaccctcgtggtactcggcggacggcacacgttcggcgtactccttgatacgaccgcgctcgacttccttgatttgcttgaccacagcaacgtcgatgccgttcggatcgtagacatagccgttggaatcggacacggtcacgaccttggcgcccagctcctcggccttctgcgcggcgtagatagccacgttgccggcaccggagatcacgacggtcttgcccttgaaggagtcgttcctcagcacgcgcagcgcttcggcggtgtaatagcacacgccgtagccggtggcctcggtgcgggccagagagccgccgaattccagacccttaccggtcaggacgccggagtactcgtcgcggatgcgcttgtactggccgaacaggtagccgatttcgcggccgcccacgttgatgtcgccggcgggaacgtcggtgaactggccgatgtgacggcacagctcggtcatgaaggcctggcagaagcgcatgacctcggcgtcggacttgcccttcgggttgaagtcggagccgcccttgccgccgcccatcggcagcgtggtcagagagttcttcaggatctgctcaaagccgaggaacttgatgacgccctcgttcacggtcggatggaagcgcagaccgcccttgtatggaccaatggcggagttgaactgcacacggtagccacggttgacctgcaccttgccttcgtcgtcaacccaggccacgcggaacttgaccacgcgctcaggctcgacgaggcgctccagaacgccgttcttttcgtattcggggtgcttggcaatgaccggctggagggtgtcgagcacctcgtagacggcctgtaggaactccggctggtcaccatcgcgagcaacgacctggtcgtacacgcgcttcacgtactcatcagtgagcataattctccctagaggttgggttatcaaataaggcgattttattgtatgtacggtgtcaaggggtgacaagaaattgctcaggatgtggcgtggagcggatgtggcctacaccaccaactccgatgcatcggcgtgagcgatggcctgctcgtagtctttggtgcccttgaagacttccttggtccacgggttgatgccctgcttcttggcgcgcagcaggatgtagccgagtgccaacacgttggccactagcgcgattagggacaccgcaaggttcacgttcgggttgttcacggactgggtggagaacacggagtagtcctggaacatcgggaatacctgcgcgaacatgcaccagatggccaatgtattggcgcgattctggatccagccgcccttgttccagaagaagttggccacggtgggcgccagcagcagtgcaaggccgcagtaccaggagtgggtgggcaggcaattgtaggtgtagcagaagttccacagatcgtaggccacgatgaacacccaggtcatgtccggccagagcatgtcgtccttcttcttggaggcgtagatgccgaaccagccggtcatgcagaagatattgaggatgccggccaagccgttgaacacgttgtgccagccaccgtagagggtcacgccttcagtggagatccaggtggtgccccagccgcggatggcggattcgaagtcagagaccacggcgatgaggatgttgatggccacgatcacgaacgggaagcacttgaaccagtgggatttgccgatagagccccacttgtatttgagggccataaagccgatgcagccgatggtggccgcgtagagcttggcgtagtggaaccagctggtcatgtgcacgtaggtcgggttgttgagtgcccagtcggcgcccattgcggcggcggtgtagatggtgatgaagtagacggtcagcacagccgggacgacgaggaaggcgacgatgccgccggttttggtgcgacgagccagttcattggcgccgataaggcagcagaagacgagtatccagccaatccattggtagatggcgttgtcgccgtagacctgaaacagcatgagcggtcctttctgatatgtggtgcgccccgcgattctccatcggattccgagcgccgacgccgcttattgacgcagcgtcaatttctctcacggcatagtgtatccctatattgacatggtgtcaatataggttctgtgcatgcggtttcgcatcattacaaggttgacaggccgctgaaatttgtctgtgatgcactagaatcgggcatgaaaagcaagcaagatgaggaggcgctcgtggaggagcaatgttctcgaatatcaaatggcaaatggtggcatcggctgaatgctaaaattgttctactttacgattatggcccgctgtctatttgaaagtgcaacaccctgccctcaacttctatcgcgatgacagcaagatagaagtcgaccttttggattttacggataggaggcatcccattctgtctgaaattcaatccagccaaacatacagagataagtatgcgaagcatctcatctccgtcggcgagcagattgataaagctggtggcgacagtctcaatgtcatatcacgagtggagtccagctaccgggcgcgaggtgtgaacgttgtcagcgctgcggattggatgttgagaagctagttgcgaaaagataaaaacctttggaatcggcatgattccaaaggttatctgtggagctagccgggttcgaaccggcgaccctctgcttgcaaagcagatgcgctaccagctgcgctatagccccatgagaaaaaaagagcggctcgcggccgcttcatttttcctgtgggcccgggaggacttgaacctccgacctcatccttatcagggatgcgctctaaccagctgagctacgggcccaatccatacgcttcaaaagcgcacaagtgattacaataccattgaacggcggtatgtcaataacggcgtgtcatgattgtcgcttgcgccatgattgccggcgcggcggtcaatgtccagcaacacagcggtcaatgttcagcaacgccatagccaatgcccggctacgtaaccttgcgttctcgcaccgtaatgctgcggttacacctcccgccctgcacagaaatgtccaatacatatgaggcttctgctgttttcgtgggttgggttctcggctgtggtaggcgtatgtcgagtccgccgcagcggagcatgattagggcgatgagattgttcgcgtggtggaagccgtaggccgtgcggatggtgaccttgatcctgttgttgaaggcctcgagtctcgcgttcgaatagcctagctcgatcgtgcgtaggatgtcgggccggcgtcttctgatcttctgatgccgccaacggcgcgcgccgccgccttggtcataaccgggccggcgttcgccgcatcggaagcatctgagcatgcccgcacgtgggtgcacgcggatctcgagcacgggttcggaacgcaatggggagtcggcgatgcgcgcgtcctcgaccaccgtgcctttgacgttgagaagccggttgaatatcctgttcatcaggcgctttttggctgttttttcttggtcgttaaacatcctacccagaaagcgctcttctcttactcccacaacgtttcaacaacgaaccaccacccacgaaaacagcaatagcgccaaaaaacacagccaaaaacccaactagtgtaaacacactctagaaaagggatacggggttgcggaccctatatttctatgatcagggcgagccaccaaagaatcaccgcatgtgaccggcactgcgaatccaggattacatgcggcgcgtaggctcatggcccatagcgctgttcgacatgatcgtcgcgtgcatacgtcatatgaaactgaggtttagggagaagaagctggagcacgacttatctccccaaacccttattgcttcagccagtgtaggtattcgtcgaagaggttgtccactgttcggctttccagtcggtatgtggggaatgcctcgggtgtgttggtgatgacttggtatccgcccaacggtgcttccgttgcggggatcatgtcggcttgtatcaggccttggtcgatgcaggtccggagttcttcccaggtcaggcggaacacggatgcggtgtagggtttggggaagctgtggtggaattcgcggatggtcgtggttccgtcgctggttttccgccagatgaatcgttggagtctgatgccggttttcagcgtgatgtattcaccgaaccgtccggtgtcgatgggctggtccagccaggtcctgtattcgtccagcctgaggttcatcgtcgtcggatccaatggttccagcttgtcagtggtcgggtgcagcatcgcggtctcgtgccggctgattcgcctttccttgaactggtaggagatgaatccgacggagtttccttggtatccgggttgcacgtaggggatgccgtggcattcgccgtggttggtgcggtgttggtgtccgcagatcagcccgtcgatgccggggatggtggagaggatgcggtatgcctggtcctcgccggtgtcgtattgcgtgggtcgtccgctggccatgtcgcattcgatgccgccgtggtaggcgacgatgagcaggtccacgtccgcgcgtatccggttgacggtggtcctgatgctttcgaccgcgtccaggacgtggatgtgctgtgtgttgcggaacgcggtgagttggggcagggctccggtaaccgcgcccacgatgcccacacggatgccccgggcttggacgagtcggtatggatggaagatcgggtggccttcctcgtccgtcacgttgcagcacaggagccgttcgtgcaggtgggggttctggcttgcgggcaatgcggtgccgtggtcgaagtcgtggttgcccagggccatggcggtgtagccgcaggcggaggcgacgcgggtgagcggggattccctctcggccgatcgggcggtgaaggtggcgtaggcgcttcctagcaggtagtcgccggcgtcgatgagcagcgtggcgtcgtccacgcccgtcatccgcttggcggcgtgtgcggcgagtatgccggccgcgtgggcgttcgcggcggacgggtcgccgggcacgtccgcgagggtgtcgggtaggaagccgtgcaggtcgctggtggcgaggattgtgatcgtggtcatgtggcaggccttttagaggagtttcttgcgtagccatccggccgccgcgtcgatgagcgcgaccacgatgatgatgcccagcaggatgatgctgaccctgctccattggcggctttggatggcgaagatcaggggcgcgccgatgccgccggcgccgaccaggccgagggtggcggcgctgcgcaccgcaatctcgaagtggttgagggacagtgacgcgaagatgggcatgagcagggggatgcgtccgaagaacgtggtcttccagaagttggcgccgaccgattccatggcttcggcgggcccgttgtccatggattcgatgttctcggcgtacagtttgcccagcatgccgaccatgtggacgcccagggcgaggacgccggccgcggggccggggcccaccaccttgacgaagatgatggcgtacacgagttcggggaacgccctgagcaggtcggtcacgaacttcgccgcgccggcgacggcgggggtgtgccgccacagggtggtcgcgctgatgaaggaccaggggaacgcgatgaccgtggcgatgaccatgctcaggaaggcgatgcagatggtctggagcatgaggctgactaggtcctcgccgctgccgtcgtagacgtacgaccagtcggggtggaacagttggctgatggtgtccgacagggaggtccaggacatgggggccttgtcggaccagttggtggtcgcgaagcagacgatgaccgcgatgcctatgagggcggccatgaggtggtgtgcggtgagacggatacgcatcagcggagcctctttctgatgatctcgctgacccagtcgacgatgacgacgagcacgagaacggtgagtatgacgagcgacacgcggtcgtagcgcatcaggctgagtgaggagttcagcaggacgcccacaccgccggctcccacgtatccgaggatcacggaggcgcggatgttgatctcgaaggcgtacatggcgtagctggcgatgtcctgcccgatctgcgggaggatcgaccatgtggcgatctgcatgcggttggcgcccacggagcgggcagcctcgacggggccggggtcggagatctcgatcgactggtagatcagctggccgacgatgccgaaggtgaacacggcgatggtgatgatgccgctgacctgtccgatgcccatgaacgcgacgaccagggcggcgagcagcagcgtggggatcgtgcggatgatgtccatgaccacgcgggcgaccgtggcgaccacgcggttgcccgtcacgttgctggtgcacaggaacgcgaacggcacgccgaacaggagtcccagcgacgtgcccaccacggacatgcggatcgtctggacgaggggcatccacaccttggcgaaatacgcccagtcgggcgacaggaggttcgagaagaaatccgcggcctgccccatgttggcgatcgcctcgccgaagtcggtctcggtcgcgtccttcgcggcgaggaagcagacgacgaacactatgacggtggcgagccgtttccacaggttccggtgcaccgtgtccttcagggggcggccggccgatggtgtgcgggtcatgatcgctcacccgtcttcccggcgtcgtcgccctcgtagatgtggcggaacatgtcgtcggtgagttgggcgggggtgccgtcgaacaccaccgttccccggcgcatgccgatgatccggtcggcgtatttcttggcgaagccgacggagtggatgctgatgagcaccgtggtcccgtcgtcctggttcatgcgtttgaggtcggtgaggatcgtctcggaggtgaccgggtccagggaggcgaccggctcgtcggcgagcacgatcctggcctgttggacgcgggtgcgggcgatggcgacgcgctgctgctggccgccgctgagctggtcgcttctcgtctgggccttgtccgcgaggcccacggtcttcaacgcgtcgtcgatcagctggtagtcggactccgggaagaggccgagcagtgacttgagggtcccgtaccggcccagccggccggacagcacgttcttctggacggtgctgttgcccacgaggttgaattgctggaagatcatgccgatcgagcagcgcatcgccctcagttgtctgcggctggccttggtaatcgactggccgtcgatcatgatgtcgccgccggtgatgtcgttgagtcggttgatggagcgcagcagcgtgctcttgcccgcgccgctggggccgatgatggcgacgaactcgccgtcccggatggtcaggttgacgtcgttgaggcccagcacgccgttgccgtattccttggtcacgccacgtatctcgatcatgggttttcctttccccgtaacgggcgaaggggcggccgccggcgtcgcgtggacgggcggccgcccccgtcaacggtcagttggccgcttccttgatgtattcctcgatggtgtcgtagttcttctcctcggcctgcgtgtagcccttgtggccccacatggccatggcggtcttgccctcctcgtcgttgggcatgtcgaggaacgcctgcttgatcttgtcctgcagggcctggtccatcgacggttggacggcgatggcgtcgttcgggatgtcgccctcggtcaggtagaggacgcgcagctccttgaacaggtccttgccggcgaacttggaggcgaacacgttgcgcgcgccctcgaacacgaagcaggcgtcctgctggccctcgagcacggaggtgatctcgctggggatgtcgttgaccgtggtgagcgtggactgcgtggtcgggtcgacgccggccttcttcaattcgaccaccgggtagatgtagccgctggcggaggaggggctcagcgtggcgatcttcctgcccttgaggtcggtcagcttcttcaggtcgctgtcggcgcgcacgagcacctcgcccttgaacgatccggacaacttgccctcgaccggcttgccggtggtgtggtcgtaggcacccagctcggaggtgaggatggccttggcggcctgcttgtcgcgcgcctgcacgtaggcggcgggcggcatgatgccgatgtcgaccttgtgcgaggacatggcctccacgatggtcgtgtagtcggtggcgagggtcacatcgaccttgcgtccgagcttcttcgacaggtagtccgcgaagggcttggccttggcctgcatgctgccgtcgttgttggtgggcacgaactggagttccagcgccttgtcggcggagtcggaacccttcgacgagccgcaggcggccatcgtggcgcacagcgcgaccgtggtggcggcgaccgcgatggttctcagcatcttgttctggatggaaaaaggcatggttcgaccttcctcaatgggttttcgttgtgaaaaaaggatttccgcgtgatgatggatgatgcgcgggcccacggcgggacccgcggtggatgatgaaaggaagactggcgtccggccgatgccggcgccggatgatgggtgaggtgtggtgttgcggctcctatctgtccaggtgttcggaaatctgtgagatgacccccgggtcctcctcgcccctgcccagctgcccggtcagggattcgatgacgatgtccaggggaagacgcgacgtgtcgatgagctcgtcgttgaacgtggtggccggcgtggacgcgaccagggtcgtcgtggcccgcgtggccagggaggagttcgcgaagctggtgaccgccaacgcgtcggccccgttcgccgtggcgacctcgaccgcgtggacggtgtgcctgttctccccggaaccggagatcgcgatgatcaggtcgcccggtttgagcagggaggcgctgatgtcctggcccagcgggtcccggacgaaggttacgagacggccgtaccgcaggagacggctttcaaggttcgccgcgaccccgctggacaggcccgatgccacgatgacgatgccccgcgcgtcgcggatcatctccaacgcccggttgaacgccccggcgtcgaggcagtcgggcagctcccgcagcatgtcgagcatgccccggatcctggcgatgatccgctcgccctccgagccggcctccccgtcggcccgcgcgtgcccgcgctgctccagcaggcttctgatcgcgttgtcgcgtgcgatgaggatcctcatctcccggtacccgtggcaccccagatcggcgcaggtcctcaccaccgtgcccgccgacacgcccgtctcgcgcgcgaccgtcgcgatgggcaggtccccgatgacgtcggagttctccaggaagaagcgcgcgaccttgcgctgcgccggatccaacgcgtccaacgcaagccggatgcgggcgaggatcgattcggccggcccgttcgcgttcacctgtcccatgacgcgcatccctccaatatcgcctcgtacatgtcgggaaggagcgccgcctggtacgtcgcgccgccatgccggcccgtgccgccgatgtacgcggcctcgcggcccgcggcgagcaccggggcgatgtcgttgtcccaatggtcgccgatgctcaacaggcgcccacgtcccgagagacggtcgaacgcggcgatatgatcgccccagcgtccgggtttgcccgccccgtcgacgatcaggtcgaaacgaccctccagcccgaaccgtccgacggtctcgcgcaccccatgcagcggcgaattggtcaacagcacgcgaacgcagcccaacgaacccagatcgtccaggaaaccgggaagaccctgcggcatgtccacatggacaagaccccgggccagctcgtcccggctggaaagatacgcctgctgcaacccatccgccggcacatggcccgcgcacatgtcgctcaccacatcgtaaccgtcgttccagtgccggccatcatccgtgacggcgccgccaagatagagatccagcgtcttgacggcctgttcgcgcaaccccgcgggcaaccgggcgaaggcatggcgcgcgtaggaacgcacaggcctgtcgcccaggctgatcgtcccatcgaaatcgaagacgaccgtgccgaccggccggcgtccgtcggtccgtgaccgctgctcttcattgctcatgcctccattaaaacacgaaatgaaaaacgttcaatgacttttgaacataattccgacatggttggcctactgttcatcttcctctgcttgacgtggcgcggatcgaatggcgggatgattctcggtgccttgcgattccgaagtgcggccgggcaccccgatgtgacttggtatcttgccatgtgccacttgagtgtttgaggtttgcggcggaccgggcggatacgtgatgatgccaagccccgataagggggtctgcgttccggggcatttgccggccgtccggcgtcacatcgtcaggctgtccgggtcgaggaggaaatcgtagacgctcatcgtgaggatgccgtgctcgtcgcggacgggtttgaccacgtcgcatacgaggacgatcttctggaagctgtcgtcgatctcgagcagcgaggccttctcctgcgcgaccttctccggtgtgggcagttggtacgcggattggatgtagcagcgccggttgccgaggttcgccacgaaatcgacctcgaggcgtttgcggtacggcacaccttcgctggcgccgcgccggtcgaccacgcccacatcgacgttgtagccgcgtgttcgcagctcgttgtacacgatgttctccatgatgtgcgtctgctcgatctggcggaaccccagtcgcgcgttgcgcagccccatgtcctcgaaatagtatttcttcgggctgccgatgtacttgcgtcccttgacgtcgaaccgtctcgcctcctcgatgacgaacgcgtcctcgagatggccgatgtattgcatgatggtgttcgtgctgatgccggaatgcagcacgctggcgaacgtggccttgatcttgggcggattggtcagggcgccgatggaggaggccagcacgtcgaccaggtcgtcgagctcctgcgacctgcgcagcccgttgcgcgagacgatgtccttgagataggtctcctcgaacaggttcttcagatagagggacttctgctcgtcgcttctcatggacaaggtgagcggcatgccgccgaacatcacgtattcggcccagccgtgttggacgtcgccgtcgtacgcctgcatgaactcgacgaacgacagggggcggacgcggacctcgtcgccgcggccgcggaactcggtcatcacgtcggtggacagcatcttcgagttgctgcccgtcacatacacgtccacgttgcgcatgcgcagcagcccgttgagcaccccgtacagacggggcggctcctcgccgcgcatctcctcgtccgagatcgcgtactgcacctcgtccagcagcacgtagtacggttcctcgcgattcgtgatacgggatctcacatagtcgtacagggcgagcgggtcgcggtatcgctcgtacatcagatcgtccagtgcgatctcgatgatgtggtcgtcgtccacgccctgcgcgcgcagatggtcctcgaacaggtcgaacaggagataggtcttgccgcagcgcctcgcgcccgtgacgaccttgaccatgccgttgcctttgcgcgcgacgagatcgttcaggtacttatccctggagatgcgcatcgtgttctccgatcaatgtcctgttcccatgccgctatcgcgtggatttgacatttatgtcagtttcactcaataggaactcattctattgcgcgattttgacatagatgtcactttcgctcaataggatgggtgaatcatgggaggacagggcgtgcgcgtggggggggtaagtggcggttgccgattcgtgaggggcggcattgtgtgccgcttgttgtccgccgttgtgcgagaatgacttgcatgccttatcgccgtcgtcaatccaccgctccgaagtccggtgcgccgaaatccgttcggtccgctgccgccgagcagtcgttggatattgatggcatccatctgcacctgacgcgcaaacccatcaaaaacctgtatctgcgcatcaaaccgccgagcggccgcgtcgaaatctccgcaccgatgcggatgagcgagagtcgtatcgcggatttcgtcaaagagcgacattcgtggattcttgcccagcagcagcgcatggctgaggcgcaacggcgctccatcatggcattgaacgagggtgccggtttcgagaacggaggtcgtggcgtagctggtgccagcggccatgatggaggcgttgctggtcgtccgaaaaccggtgatatcagtcgtccgggaattggtgacgccgggccaggccaagccggtacgaatgtccaaccgtattttgaccgctcccaaatctggaccgacgaacgcaaacgacaagcggcggccgcgatcaacgccgcgttgccacagctgctggccaagtgggggccggttattggccggcagcccacgcatatcacgctacgggtcatgacctcgcgctggggatcgtgtacgccgcgaaccggccgcatccgtctgaaccttcaattgggagtgatggaaccgcaattcctggaatacgtcttggtccatgagatgacgcatctgtgggaaagcggccacggcgccggattccaacgccgcatgaccgcctacctacctggctggaagacgctacgccgcgacctcaaccgccgcgtggtgctgtgacgatgacaggtcaggcttcagtgccggcgagcccgctgtggttacctgctcggcgctgaagaagatctaccgcgacaagctgcgccgccaaggcgtggtgttcgtctacatgcagggcacattcgacgaggtaatggaacgcctctcccaccgccaaggccacttcatgaaaccgagcatgctgcaatcccagttcgacattctcgaagagccgggcgatgacgaaattcacgtcaacgtacacatcggccaggccgatcccgaacacgaggccatggccgtggccggtgccctcggcctgtgagccatctctctgctccccttagtctcacttcgccacaagtgcggcgcatcgatgaactcgaacggcgcatcagcgaacttcagctggagctgaagcagtgtgaaggccagcaagggtgagctgatcggtccagccgagctactcagaccaaccagcccagccagtccgttcagaccaacctaactgattagaacgggccctctgaccagtccgaaccatctgaccggcctgtacttgttgactaagtgtgctgcccgtcattcgttatggaacatgccggccatgtatacaggcaggtaggttacattcccttcgactgagacgttgcacgggccaagcacatagcctgtattgaaatggtattcagggtgggcgagcacgttgtccattgcgcgatggcgtttgtaggatttgccagacttcacctcaatcggcagcgcgtgatcgttgcggtcttggatgaggaaatcgagctcgccaagcttcttactgttgtagtagtacaggtcaaatccgtgagcgcgtagctcttgggccaccgcattttcatagattgaaccgtagttgatatcagggttgccgtcgagtacgtcgagcgctgttttcttgagaaacgagccggtaagcagacccacgtcgttgtaaaagagtttgaagaggttacgttccttgctcatctccaacggtgtgcacggttcgtccacgttgtacgcggcgacggctacatccgcattgaccagccagtcgaaatcggaagcaaccgattggaatctcatgttcttttcgattttggcgaaggtaaagcgcttgtttgggttatttaactcgctgggcaccaaatcgtagatagcgcggatatgcagccggtcttctttgcgcgcgtattggctgatatcgcggcgatattcacgctttatgttctcttgtatagtgcgcacgtccgcaacgctgccgtttgccgcgaacgagtcgaccgcggcaggcatgccgccgataaccagatatttggcgtacagctccatgagctgttgatggatgaactcatccacttcctggtgcttggcaaagcattcggcaagcatgttgaatacgtcgttgccgatatgctgcgaccagcagaactcttggaaatccagtggatacatatccagctcggtcaggtacccaaccggtaccgagcgtatatcttcgagctcgactccaagtagcgagccggaaagcgcgtaatcgaaccgaccatcatctacaaggaacttaattgcggtgaccatttccttgcaacgctggacctcgtcaaaaaaaatcagggttttgccgggtgctaatggcgtatttacggccagttccagcctcatcagtaggtttttggcatcgcggggccggtcgaataatgcaacgaggtcagggttctcgatgaaattgagctcggcgatatggtcgtaatgctgttgggcaaagtgcctgatgatataggttttgccaatctgacgggctccggtgaccagcagtgcagtgcgtttcggcgcggatctccaagcttccagctgtgtctcgatttttcttcgcagcatgagaatctccagtcatttgtaggccttgcatctatgctgggcacgttttccaactgtctgtagagcatattttacacttttccaaccataagaatgtggttttggctacgttttccaacctcagaatggggagttttatacacttttccaacttatgtatgtggagattctctatttcacgtgagacgaaagtggctcccctctttgaggggagccacggaatacagcttttacttatgccaggtgagagcgcatgaaccactggaacttttcgagttcctgcacgtgatcctgaataacgttggagctgatgacgtccagctcatccagctcagcgatggccttgcgatcgtcggcgatgaaggcgtcgtagtactcgatcagcgccttgaggtactcttcggtgcccacgcggccctcggcgtcgaacgacttccacgtgcggttgcgcacgatggcgtccgcgcggccgtccggggtgccgcccagcgtagcgatgcgctcggcggtttcgtcagcctgggccagcacggcctcgacctcggggtcaagcatctcgtgaacggcgatgaagttcgggccggtcacattccagtgagcgtgcttcaggaccagagcagcctcctgctcctgactcagtcggttctgcagaatcgcgatggccttctcgctggtcgcctcatcgagtcccggcacaacaaatgcaagtgtcataatgttccttctttctatcggtggaacgttgctcttcaattctacgatttgcggttctgctccgggccgaacaaataggtggtgaatatcacgtgactattaggaccaattgcaaaaaactctcactggcagcggctcagtgagagttttttgcaaaacgcggttagttggcgtcgtcggtttggggttcctccggcagcggcgcatgatccggggcaccggccttgcggacctcgatggtctcgatacggcggccgtccaccttggtgaccaccatgtcatagccgtcgtcggaatgcagcacgtcgctcaccgcgcccatcttgccggtcttggacaggaagtagccggcgaccgtctcgtacgggccgtcctccaattcgatgccggtcagatcggcgaagtcctcaatggtcatgctggcctcgatcgtggccacaccattgacgaacgcggtgcgggtggtgcgttcgccgcccttctcgctgggcagatcgtactcatcgcgaatatcgcccacaagctcctcggtcatatcctcaagcgtcacgatgccgtccgtgccgccgtattcatcgatgaccacggccagatggatgccgcgcttacgcagcagttccaggcttggcagcagcttggaggtgccgggcagagagatgccttcgcgtaccacatcgcgcacgatcttggcgttcggatcgcgcacatccagcagatcacgcacatgcacgaagccgatcacgtcgtcgaaatccttgccggtcaccgggtaacgggagtacggctggtcgcgtacgaacgcggcggcctcggtcaggggctggtcaccctcgatgaagaccacatcggcgcgcgggcgcatcacctcagcgacgatggtttcggacgcatcgaacacatcgtcgagaatcgtgcgttcgtccttggagaggttggtgttggagctgaccagcacgcgcagctcgtcgtcggacacctcggactcggtctgctgcgggtcgaagccgagcaggcggacgatgccgttcgtgttcttgccgatgagccagatgatcgggcggcagattgtggcgaacgcgtcgatggcgggtaccacggcgcgcgcgatctgctcggtgcgctgcatggcgatgcgcttgggcaccatctcggagatcacgatggagcagtaggagataatcagcgtgagcacgatgttcaccaagccaccggcgatgccggtcggcacaccccaaccttccaccataggaatcagatacggggcgatggaggaggcgccgaacgaggcggacaggaagccggagagcgtcacaccgatctgcacggtggagaggaaagtgttcgggtcacgtgcgattttggcgactttggcgccgcgagcgtcctcctgctccatttgctcgatctgcgagccgcgcagagagaccaatgccaactcggtgccggagaacacggaaccgataacgagaaatacaaaaatcaggaggatgttcaaaccaagtgacatgcctttaactctaggggagtggcacgtcaaattggggtgtgctggctgggcagggtttgctagctgcgctggctatgtgaggcgtgatgtgtgccgacgtgcgtgacggtgtgaaatagtatgcaatggtacgcaatcgtggcatatggtgtaatttcgtgtaatttggtacgcattcgtgtaatataatacgcaatcgtggcagatggtatgtgttgtgggcaggagtatggtcatggcaatcaatcccttcaaaccaaccgccggtaaaatgccgccgattcttattggtcggcactccatcatcgaggatttttccgaagcgttgaccaacggagtaggggctcctgggcgcattatgctggtcaccgggcagcgcggctttggaaagacggtgatgctcaccgaatttcggcgtatcgccaaagcgcagcattgggaagtcattggagagacggcatccgcggggcttgtcacgagactcatagcggcattatcgccttcgggattgcgcctggatcaggccaacatcagtccttccattggaatttccggcattgccacggcgagtctcgggcaagcgcacttttctgcggaattcaatccgctgacgttgcgcaacgcgttgaataaacagttgggcagtaagaagctcggtaaggggaagggcattctcatcaccatcgatgagacgcaagcggccgcacacgatgatttggtggctattgctacagccgtgcagcacgtcattacggatgccgatgaaagtgatacgcctgatgccgacaagaaaggcgttgccatcgtatttgccggcttgccgtatatggtcaacgatttgctggataacgaggtgaccacatttttgcgccgcgcgttgcgccgtgagctagataatgtgccgcttccagacgtcaagaatgcgttcttggagacggttgcggattccggtaagaccatcagcgaggaggacgcgctggaggccgctcgccagtccgacggatatccgtatatggtgcagctcgtcggctattacatgtggcaatccgcgcagcgtcgaggctcgaatgtcattactgctgatgatgtgacaaccggtgtttccgatgcgttgctcgcctttgacgatgccgtatgcgctccggcgttggacggtaccaccagcgcagaacggttgttccttacggcgatggccgaagattcgccgaatcccacgcaggttggcgatattgtggatcgcacgcgcagaagccgcagctgggtgagcaagtaccgggcgattctcatcaaggataagctcattcgaccagctgggcatgggcggctggagtttgcggtgccgcatttggggcaatatttgcagtcactatagaactgcaaacaaggctcagaagctcagcacttcgactttgccggagtcgagctggtagcgggcgccgacaatcatgagcttgtcagcggcgagggcctgctggatgacaggagactgctccaccaaagtttcaatagtatgggccacgtgcacgcgctcaatatcctcgtgctccttaagctccgcctcgcgcgcctgccatacggacatgcctgcctgacgcagaataattgattcggcatcggcaatgtgctcatcgagatcatccatggcgtcggcggcttccaacgaaccatctgcctcggaggtgatggtgtgcatcaggtcgtcaagctcctgcgtggcggcctcgattgcgccgcaatgctcatggcccaacacgcagatcagactgacatgcagcttcttgaccgcatactccaacgaagcgatgacggcactatcgatgagctggccggcggtgcgtacggtgaacaggtcacccaagccctgatcgaagatgatttccggaggcacgcgcgaatccgagcaggccagcacggccgcatccggattttggccgtctagcaacgtctggcgggtttccttgtcttgccatggatggtccggcttgccttcggcgaatcggcgattgccttggagcatacggctccacgtcgcatttgcggtcgattcctgttcaacgtctgcctgagccatgaaaacctccattatcagcggactgctggtacccatagtagcgattggaagtgcggattcgcggctgcatgcataatctggctttgcccaaagcataatgagaacgctcacaatctcaatcctttttaagggtgggccgtgatgatagtcagcacaagggctgtggctggtgtgataaggctcatatgttctgtccgtgcgagccctgtgccgccacactacgatgggttctggtaatcgcctgaagaatcctgaaaggaccgaaaatgactcttctgcagcatgaattgaccgatttcaaggtgaacgcattccagaacaacgagttccacgaggtgaccaaggacgatgtgctcggccactggtccctgttcttcttctacccggccgacttcacgttcgtgtgccccaccgagcttgaggatttggctaagaactacgccaagttcaaggaaatcggctgcgaggtctactccgtctcctgcgacacccacttcgtgcacaaggcctggcatgacgccaacgagaagatcgccaagattgaatacccgatgctggccgacccgaccgccctattggccaaagatctcgacacctacaacgaagttgatggcatggccgagcgtggtgacttcatcgtgagccctgagggcaaggttgtggcttacgaggtcatctcctccaacgtgggtcgcaatgccgaggaactgctgcgccgcgtgcaggcctcccagtttgtctacgagcacggcgaccaggtttgccctgccaactggaccccgggcgaggaaaccattgagcccagcctcgacctcgtcggccagctgtgacggtttgaactaaggcatgttgtttgcccccgctggcgggggctgtcggcaacgccgactggaggtggtcgcggcaataggtgaactatccccacccgcttcgcgggagcccccgccagcgggggcctgtgtatatgcaaggagtttcaatcatgactcagaccaataatctttatgacgtcgtagtcattggtggcggacctgcgggccttaccgcgggtctgtacttggcccgcgctcgctaccgtgtgctgattctcgaaaaagacgatttcggcgggcagatcaccatcaccaacgaggtcgtcaactatccgggagttggccgcaccacgggtcgtgcgctcacccagaccatgcgccagcaggcacaggacttcggtgctgaattcctttccgctgaggccaccggccttgacgtggacggcgacatcaaaaccgtgcacacttcgcgtggcgacatcaagaccttcggcatcctcatcgccaccggcgccagcccgcgcaagctgggcttcgagggtgaggccgaatacgcaggccgtggcgtggcttactgcgccacctgcgacggcgagttcttcgccggcaaggaggtgctggtggttggcggcggattcgctgcggccgaggaatccgtgttcctgactaagtacgcctccaaagtcactgttctcgtgcgtgaaccggacttcacttgtgacgccgcagtggccgccgaggccaaaaacaacccgaagatcgacgtgcgctatcaggtcgaactgaagggtgtcactgccggtcagggcggcctgcgtgaggcttcgattcttgatttggctaccggtcagaccgaaacttggaagcccgccgattcgggcacgtttggtgtcttcgtgtttgctggctatgtgcctgccactgatttggtgcgcggcgtggtggagctcgatgatcacggttacgtggtcacgcatgactatcttgaaacctcggtgccgggcgtgtatgcggctggcgatttgcgcgtcaagaacctgcgccaggtggtcaccgccaccgccgatggtgcgattgctgccgtggagctggagcgttacgccaagcagatgagcgagaaaaccggcatggtgccacctcgccccaccgtctgcgcttacgaggagtccgaagcgaaggccgcctccgccgcctcggccaccggcacgacgcccgctccggcacccgccaagcgcagtgccgatgccgcagccgcagccagtgccgccaagaagcccggcgagctgttctctgccgccatcaagcagcagcttgatgtggtattcgggcgcatggctcgcccggtcacgattgcccttgagctggatgacactccactttcggcggaattgcaaggctttatcggcgagatggtcgccttgtctggtggcaagttgaactcggttgccgtcgatgccgcagggctgattactgcggtggacggttcgagtgcgcctacgtcgttggtagtcggcgagccgctgaccgtcactctgccgagcggcgccgaactgcccacttatggttcattggacgattctggtcgtgccacattcgatgtcgccggcgtcctgccgatcgcccgtccgaccgtgcgcatctgcgtgccggctgagggcgatagcgaggaaggcaatggctcactggtcttcaccggcatggctttccatggcgtaccctccggccatgagttcaactccttcgtgctcggcctgtacaacgcggccggaccaggccagccgctgggcgacgatctgatcgaacgtgcgaagtccatcacggatccgctgaacatcatgattctcgtctcgctcacctgcacgatgtgcccggaaaccgtgctcgcctcccagcgtattgcctctctgagtccggccgtgcgcgccgaagcctatgacgtctcgcacttccccgaactcaaagaccagtacggcgcgatgagcgtgccctgcatcgtcatcactcacgccgacggcacccagcaagtcgaattcggcaaaaagagcatcccccaaatgctcgaactggtcggcgcgtaagccgcacggcctcagccgtattcaacagcaacaacaacgattctgccaaaaccatgacgtgcatcgattgatgcgcccgattccggcagaatcgttgttccgtcatgtcttcatttcccgatttgacatgttttcgtttctgactttgacatgattttgattcttagataacgcccgagattttgcgcactttggtctggtcttgggatagaggcatggtccgtgtcctgtgtacgattttctgtcgccagacatagaaaaccgcgattggaaagcaggacacgaaaccatgccgcagcagattctacaggtcgaccaggccaaagtgcacaacttttcgggcactaccggtgatttgtttgttaacggattacactggagtaccgtaaggcaggaacaatggagggtttgtgggcagaactatgccataaccccgtttaaaggagtattcactggggcggcggcatggaagtgcttttggtcggtaataccgatttcattaccaaacagtggattcagcatgcctttccccgagaccatgtggtgatagcggaacgagaaggcaccgtagacggcaatgaccgtctcagaatcgtcaacatgtctgacgccaacacccttgccgaaacccttaccacatacgaatttgatcgcatcgtattcttttccgaaaatctgaccccacgcagtgaccgagacggcgatctgggaacattgcgaagatttctgcatgccattcgcaacaggcaaacgcaaatgctgatggtcagcggccccgaatccgaatttacctatccggaaaacgccgacgtacgtgataccagcaaaagcctgatgtctcgagcgtcggaagaactctgcctgtattatgcgcgtacctaccgtctggaagcgaaaatcattcgctgcccatacttgtatgcccccgaacgcaatggggcaaccgcatatttcggcaggctgctcgaacaggcgtcagcagggtcgatctcattccatgaacgcgaacagcagcagacatgctttctctgcgccgacgatcttgccgaactgatctaccgcatgttcgacgattggaccgccgaaagcgaagtattccacgtgcccaacgtgttcaacttcacatacggtgatttggctgatgtaatcagcgcggcatttcccggattgtcggtgacttttggcgaagacaggccccaaagttacccagcagacgaccatgcgctgcgcttgcgttatggctggtcgccgcgatattcgctcaaacaggattttcccctggtgctgcaacgctggaaagaggctcgtgcgcaggaacagtccgaaaagcacccgatctgggattttctgcgtaaccattcgaaaccatggatcgcatttgaaatctgcgtcacgttcatattggaagaactgcttcgcaccgcggtacaaggcaacagtcagctcgaaaccgtggatttgcgcctgtttttcgtggtaatcgtcggcacgatgtacggactgaacgcaggcgtgttcgcggccgcgctcgcatgtgccggcatggcgttgtcgtatgcgtcgaagggcgcgtcgttcgctccgctgttttacgacacgtcgaactggcttgcgttcgtagtgtatttcgttgccggcgcagtatgtgggtatgtgcagctgcgtaatcgcgaaaacctgcgattcatgcgtgacgaaaacagcttgttgagagagcgacttgcgttcctgcgtgacctgtaccacgatgtgcttgatgatcgtcgtatgctgcgcggacagattatcggcaggcgcgacagtttcggcaaaatgtatgcgatgacccgtgaactggacgaagtgctgcctcgaaagctgtattacgcgaccattcgcattatgcaagatacgttgggcggcgatagtttcggtatttaccgaatcgataatggtggtcgtttcgcgcatttgatggccgcgagtccgcagaccgaatccttattcagtaaatcggcgctgcttgagaattatgccaacattgttacggccttggatcatggcagattgtgggtaaaccgcaatctcgaacaaaaccttccaatgtatgcggcgggcgtgcgtgccgatggcaagctggccgtggtgattgtgcttgccaaagcgcagcccgaccaaatgaacctgtacttccagaacctgttcaccatcatgtgcggcttggtggaatccgcaatggtgcgtgccttcgactatgagaatgttgcgcggcagacgaggctggtgcccggcacggaattcttgaacactcaggcgttcctgcccaaagtgctggctgcaaacgagctcaagcgcaatcatatgagcaatcatctgctgttgcgtgtggaagacgcctggcaagacgatggtagccgcctgatgggagccattcgtcaaacggatgaggccggtgtactgcaggacggcaatgtgtatgtgctcatggatcaggtcagcgagcatgagctgccgattatcaacaggcgtttgtcccaggctggattgcatgtgacgctggtttcagaccacgaggaagattcgttgctggctaaggcttcggaacaagtggctgccgaatcgcgagcggatgaaacgccgcgcagtaacgctgcgtcgaatgactccgcatcgtacgaaggcggcgcagcatgaatgcgacggtgatggcgatgccgcttatcgccgtgcatgtaatgatatgcgtgctgctgtgcgtattgtctcgcgttggcgtgcttcgtgtggaggggcggctgcttccctttatgctgctggtgccattgtgggggccgttatgcgtgctgttgctgcatgtgcgcactttgattcgcgctgacgggcacacggctccggggcttgagcaaatgcgtgtggatgatgaggaacgtcggagcattctggttgaggaacgggccgatttcgccaatacagtgccgttggaagaggcactgatcgtcaacgattcgagtcggcggcgcagtctggtgatgtccattctcaacgacaatcccagccgttatatcgatgtgctgtcgcaggcccgactgaatgaggatgtggaagtcgtgcattacgcggctaccgccatggcgcagatcagtgccaaggaagatcttgcattgcagcgctgccgtaacgattatctgcagcatcgaaattccgaaacgatgttggaacgctattgcgatgcgttggaacgatatgttaattccggcattgcgcaaggatatgctttgcagttgcagaagcagcgatatgccgaagtattgcaggaacgacttcgcaaacatggcgattatcacgttgcgtgccgtcttgcgcaaatgcagattgatcttggactctttgatgatgccgcacacaccattgacggcgctatggaacggtggccggatcaaggtgacgtatggctgatgcgtctacgactcgatgccgcacgcaatgatggcgatgcgttgcgtcacaccgttcagcagatcgaaagcaagcatatttatctcggtggccaaggaaggcgagcgctgcggttttggactggaaccaaggaggctgaacgcgcatgatcagaggattcctgtcagacgtgttggccaagtggaagcgattccgctggcaaggtttggtcaaagtctgggctgtgtttatggtcatcgcattggtgttgctggtggagagcttgggcttgcattacggtgccacgcgtttcgacatcacgtatttggatcgagacaaggccattcctgcggccaacgccatcgctggcgaaaaagctacgaatctgttggtggttgacagttcgcaggagggtgtcagcgatgccgaagccatgctcgaccagattctgcttgatatgaaagtccctaccactacggttgacgtggctgacgaaaacgctgaatttccagcgttgaatcactacggcaccatagtggtggccatgcctaatctcgaccgtctgggcgagcatgtgctgcaaatcatgcaatgggccaaaaagggcggcggagtcatgtttgccatgactcccgaaaaaaccggctatttggacgtgatcggcccgcagatcggcattgaatcgtccacatacgaatatgtggcgactgagggcattacaccgtccgaggattttatgttgggggggggggtcagacatacacgttcagtgacccgttcaaatcgtcgctgagcgtcgcgttgaatgatcgtgcacaggtggaggcggtcagcagcaatggcagaacgccattggtgtggaggagctcggtggagtcaggaacggctgtgatgtgcaatatcggcatttacggcaaggtgtttcgaggattttacgcttcggcgttcagtctgctcggttctgccatggcctatccggtgattaacagcgcggctttctacttggatgattttccctctccggtgccgtctgacaatggcaaatacatcaaacgtgactacaacatgagtatttctgaattctattctcaagtatggtggccggatttggtgcgtcttgcggaacggtacggtattcgtttcaccggtgtgatgattgagaattacggcgatgacaccaaggatgatccggtacgacagacggacaacacacaattcgagtattacggaggattgctgcttcggcaaaacggcgaaatcggatatcacgggtacaaccatcagccgttggtgttgccgaatacgcattacggcaaggaatacgcgtacgtgcaatggccgaatcgcaaagccattgtggcatcattgcaggaactgatcgcattccagaaagacgtattgccggccgcaacatcgtcggtatacgtgccgccgtcgaatatcctctcccaagaggcacgaaagatcataggcgaggatgtgccgcagattcgcgccatcgccagtacgtatatgccttccgacagttccttgccgtacatacaggagttcggtgttgcggccgatggtgtggtggaggctccacgtatcgtgtccggcggcatggtgggcgacacgtacatgcgtcttgccgcggtttccgaattgaacatgcactatgtgagcacgcacttcatgcatcccgacgatctgcttgatgaagatcgtggtgcgaaagaaggatggaagaagtactaccagggattggaaaactatcttgactggctggaacagtcggctccgtccattcgtatgcagaccggaacggaatgcgctgcggcggtgcaacgattctcaggattgacggtttcgatgacaacgtccgacgatagttgggatttgcatcttggcaacctcaccgatcagggatggctcatgttccgtgcgaacaatggcacacctggcagggtccgtggcggaagcctcaccaagctgaccgggaatctgtatctgcttaaagccacgagcgccacggttcatatcgaacgcaagactgggggagaagcatgagaatctgcctggttttggaaggatgctacccgtacgtgcatggtggcgtgtccacatggatgcacagctatatcgaagcgatgaaagagcacgagttcgtattgtgggtgatcggtgccaaagccgaagaccgcggcaaattcgtatatgacttgcctagcaatgtggtggaagtgcatgaggtgttcctcgacgacgccttgcgtctgagcggtgaacgcgcgcaagtgtcgttcaccgaagaggaattgcggtcattgcgcgaactggtgaatcttggcagcccggactgggatgtgctgttcaacctgttccacaccaaaggtgtgcatccgctgtcgttcctgcaaagccgtgaattcatcgacctgttcacacaaatctgcatggaggaatatccgtatgtggcttatgcggatgctttccataccgtgcgttccatgctgctgccggtgttgtacttgatgggcagcgaagtgccgaaagcgcaaatctaccatgcgatttccaccggatatggcggattgctagcctgtttgggcggttccatcaaccatgcgccgatattgcttacagaacatggcatctacacgcgcgaacgtgaagaggagattatttccgccgaatgggtgctaccggctttccgtccgcgttggattcgtttcttctacatgctttcggaacagatctaccagcgtgcatggcgtatcactagtttgttcggtcgtgcccgtcttatccaaatcggtatgggtgctcctgccgacgcctgccaggttattcccaacggcattcaatacgaacgtttttgcgatattccactgaaacccgacgatggttgggttgatatcggtgcggtggtgcgcatggcgccgatcaaagacgtgaaaaccctgattcatgcgtttcatgagctttcatctcgcgttgacaatgtgcgtttgcatattctcggcggtgttgacgatcaggagtatgccgacgaatgctatgagcttgtggaacagttggacgtgcgcaatcttgaattcacgggccgtgtgaatgtggtggaatacatgcgcaagcttgatttcaccgtgttgaccagcatttccgaaggccaaccattgtcggtgttggaatcgttcgcagccgcacgcccgtgcgtgaccactgatgtcggctgctgccgtgagcttttggaaggcgaggatggcgatgatttcggcactgccggtttttatgtgcctcccatgtaccgcgaaggcttaagcggggcgatggaacgcatgtgttccagccgcgtgttgcgtgaaaccatggggcagatcggccgcgatcgtgtgaatgcctattatcggcatgagcgcatgcttgacgattatcgcaggctgtatagcgataccgcggatcagttcggattggagcgctgatatggctggtattggatttgaactgaagaaactgttccatcgtaggggcttgatggcgatgctgcgagcctacggctatgccggcgtgatttgcgcaggcccgatgctgctgggcgtgcttctgcagtttggcgtgctgatcgtgagcagttggtggcaggtgggccgccccgatcgtgatctgctcgtatgcatgatcacatacacattgcttgcctcgttggtgttgacaagttttctgtcgatgccggtcacacgttttttggcggatatgctgtttgatcacgatgagaagatgattctgccgtcgttttgggggtctaccggcatcatgttggtagtgggcgcggtgttgtacacggtgtttctgctgttttctggagccacgctgatgcagggcgcgttgtgtttatggctgtttcttgaaatggtcgtcaactggaatgcgatgagttatttgacggccattaaagattacaaaagcattctgtattcttttgttgcggcggtgctggtggcgtttattacgtcatgcgtgctacttgcgttggcgttgacgccggtggaatcgctgttgtttgcggtggtgcttggctatggtgtgatgctggtgtgggatgtgctgctgttgcatcggtattttccgcaaagtcgtgagaatccgtggctgtttctgcagtgggttgaccagtttctgccgttggcgttgaccggattgtttaccaccattggcttgttcgcccatttggtgatcacctggtgtgggccgcttggcatcaaagtgaagggtctgttttatggtgcgccatattacgatgtgcccgccatgcttgcgtttttgacgattctgatcaccacggtgaattttgtggtgtcggtggaagtgaatttctatccgacatatcgttcgtattacagtctgctcaacgatggtggcacggttaaagacattaccgttgccgaaaatgaaatgctggctgtgctcaatcgagaattgcattacacggcgttgaagcaattgttggtgaccgctgccgtgatttcgttggaaaaaacagcgctgaacgcgcttcctttgggtttcaacgatgtgatgcatggatattttcgtgtgctatgcgtcggatatgcgctgtatgcggtcggcaataccgtgatgctgatcctgctgtacttcaccgattattccggtgcgttgactgcatcggcattatttgcagggtcgacggttattttcacggtgattggacagttcttcactaccacactgttcggcttcggttttctgatgggagcgtcgctgttcgctatttatgcgacattccggctcgcctcatacaccgacaatctgccataccgagtgctggggcagcagccgattgtggcacagacgaaacgtggacgtttcaccgaactgggcatactgcttgaacatggcgaacaacgaatcgatcaatcattgcatcgcacggaatataagaggcacgtgcggcgcgagtgcgggacgaacattacagaagcgaacaatacaatcggggaggaatcgtaaatcatgacatggtggaatcgacgcaacacaaaagccattaccacgcttgtcaagcaaatagcggcattgatggcaatgctgatggtgctttcctgcgccggatgtgcgacttcatcacccagcgataatgaacaatcgcaatcatcggattcaacgcagacgcatgagcaagtcaagaaaagcgctgaacaaagcatcgacggcgcacacttgcgcgacaacgaatcgttatacaaggtgtatgacgacagcggcgtggaaaccatgtatctgacggtatcgcgcggtaattcatcggaaggaaccgaccatagctggagtgaaatcaaccagtattccgttgatgactatgcggcaatgggtgttggacgctacaaggtcaatggtttgctgcaggtcggcgacgaacaagggccggtttccggggagcttggttttggcgaaagcgcgccgaacgccaccgtgcaggtacgtggtcagtcatcgagtaaaaacgagcagaagaattacaagatcgagttgaaaagcggaaaaggcaggtggcgtggccagcgtaccatcgcattgaacaagcatatgggtgaaggtctgcgtttccgtaacaaaatggcctttgatctcattaaaggcatcgaccagatgatggggctgcgcacgcaattcgtgcacttgtatgtgaaagacgagaccagcggatcagattcctttgacgattacggtctgtatacgcaggtcgaacagctcaacaaaaccgcattgcaagcgcacggacttgataagaacggccagctgtataaagtcaattatttcgaattccatcgagacgaagacgtgatcaaactcgccgacgatcccgactatgatcagacgaaattcgaagaaaaactggaaatcaaaggcgacaacgaccataccaaactgattgccatgttgaacgcgctcaacgattattcagtgccgatgagcgacattctcggcaaatatttcgataccgaaaatctcgcatactggatggcattccagctgttgaccggcaataccgatacgcaaagccgcaatatgtacctgtatagtcccacgaattccgacaccttctacgtgctcgactgggacaacgacggcatgctcatgcgcaaggaatatgagatcaaacaacgttccgacggcaaaagctgggagaacggcatcagcaactactggggcaacatgctgtttagccgctgcttgcagaccaagtcgttccgaactgcgctcgacaaggcaatacaagacgaatacaagtacatgaatgccaatcgcatcaactccatggtgaagcattaccgcagcattacggaacaatatgtgtggaaaatgcctgattccatgtatgaaggcgttaccaaaagccaatatgatgtgatcgcgaaccagctgcacagcgaaatcgaacagaactaccagacataccaaaccgggttcaacaagcccatgccgttctacatcggcacacctacccctaccaatggcaagctcaaactcagctgggatgtctcctacgatttcaacgatgaggatttgcgttataccgtcaccgtgtccaaggattacgaaggtaaggatgtagtgttcacacagagcgacctcgtattgccggaagccgtgatggacatgcccggtgaaggccagtacttcatcaaagtgagcgtgcgcaacgcatcaggcgagactcaggacgcgtttgactactacgtcaccgacggcagcaagatctacggcaccaagtgcttctatgtgaaagccggcggcagcattgtggaggatgccaatgttcaatgatggtggcaatcgaggaacgtcgctgctgcagcgtgtcaaacgtcgggtcagcgaagaattatccgttccgccgagcaccgccaaggaacggttccgtcatgagctcaaatatctgatctcatacgcgcaaaaagccgatttgaacgtgcgtatggcgccgctgcttggtctcgacaaacatgcgagcaacggcggctatatgattcgcagcctgtatttcgatgattattggaacaccgcatatcgggaaaaagtcgatggtgtgctgctgcgcaagaaataccgtattcgcatctacgattacagcgaccgcgtgatcaaactggaacgcaaacgcaaaagcgacagttggatttacaaggaggatgcgccgctcacccatgagcagttcgaccgcattcttgccggcgattacgagtttttgcgcgacagcgagcatcaattgtgtcgcgagttttatgtggaatgcatgtgcaatgtgttgcgtccgcgtgtgatcgtcgattatgagcgcgaaccgtggattcttgacgctggcaccgtgcgtgtcactttcgatatgaacgtgcgtgcggcggttggaggattcgatgttttcgacgccacgctgccggtactgcctgtgcttgagccgggaaaactggtgatggaagtcaaattcactgaatttctaccgcaagtggtgcgcgatctgttgccaggcaaggcgcaggagttgacatcggcctcgaaatacgtgctctgttatgacaaagcctcgtatttgcggggattcggctactggcaggaaggctggagcgtgccgagcctgtaaagacagtctatgatcggctggcatttcccgaaatcaaacgttacgaatcaaggaagcaagagagaaagaacagcgttatgagcgttaatgacatgatcaaaaagtcggtgctgaaatccttcagccaatacaatgtgcccaaaatggcgttggcattgctggtggcgttgattgtcggcatcgtcatctactacgtgtaccgccgtttctacacgggcgtggtgtattcgcgcagtttcgcggtcacgttggtgggcatgtgcgtgctcacctgcatggtcacgttgtccatcagtactaatatcgtgatttcccttggtatggtcggtgcgttgtcgattgtgcgttaccgtaccgcggtcaaggatccgatggatctgctgtatttgttctggtcgattacttcaggtatcgcggcgggtgcgggcatgtatgtgctggtgattgttgccggattggtgatgatcggtatgttggcgctgttctactcgcatcaagacaagggtcgcgtatacattgcagtgatccactatatgggcgatatggttggcgatgagatcacgcgtgcgttcgggcgtaccaaattcttcgtcaaatccaaaaccatgcgtggcgaacgcacggaaatggccgttgaagtgttctgcgacgacaaggatatggcgttcgccgagcgtatccgtgcgattgacggcgtcgaggacgtcactctgatacagtacaacggcgaataccacggatagttttttcgacgagagggagaccgcgtgaccgacatgccggaaatgggcggaatgccgtctaatgacgagctggtgcctttctttacattcgaagacatcgatcatgcgctcgaaaacggcgaattctgctgttatctgcagcctaaatgcaatgcggagacgggaaccattgtaggagccgaggcgttggtgcgctggaatcaccccaaatatggcgtgattcccccaggatggttcgtcccggtattggaaagagccgggcgtatctgccatgtggatgtgttcgtatggcgcttcgtggctgagatgctgggcagatgggagcatgaaggacgcaatctggtaccggtttccgtgaacgtgtccatgatggatatcaaccagatggatgtggccgacgtgatcggcgggctgctgaacgaatataacatcgacgcgcgtctgttgcaggtggaaatcaccgaaagcgccgtggcgaaaaacctgcccgtggtgaaggataccatccgcaaactgcatgcgagaggcatcgtggtactgatggatgatttcggttcggcatattcctcgctgaacatgctcaaagacattaatgtcgatgtgatcaaactggacacgaagttcatcgaactgagcgatgagaatgccggtaaaggcatgaaaatcatccaatccatgattgtgatggctaagaagctgcatctgatgatcatcgccgagggcgcccagaccaaggaacaggtcgattggctgaaagcaattggatgcggatacatccaaggatattatttctaccctccactgccggtgaaacggatggaaacgctgttggccgagcgtgccgacggtcggcactattgggatatgtcgtgcgattacctgcatcgcgatcatgtgaccgttaacggccgggtgctgttgggagcctccgcgttggcggccgacgcctttgaaatcctggctgatggtctggcggaaatatcccggttgaatgtggcgacaggcgaataccgtgccatcaaacgagatggggtgattcccgatccggaagtcgacgaattcggcgcctacatgcgtgcggtggccaccaaccgggtggtgcatcctgacgatgccggacgattcttcgacgatctgaatctgccttcactccgggaacggctatacaggcaggaaaccatgctggggatataccgtagcgaggtattggccaaaaccggcgtagtcacattcgcggtgattcccactcacgcatgctccccatccaacccttgggctgtggtgctggtcggacagaatctgcccatcggactattggcatgcggcgatgccgataattaccgcagggactcgctgacggggctgctcaaccgcaatgcctacgatgacgacttggagtacatccaggccacgcatgaccagccgctgacggtggtgtacgtcgacatgatcggactgcatgaaatcaacaaccatttggggcatgccaagggcgattcggcgttgtgcgaacttgcggatgcgatgcgtgcctgcttcgatgacgacaggatctaccgcgtcggaggcgatgagttcgtgattgtcagctgcaaccatacggtgagccaaagtatgcgtcggatggcgcgtatgcgtcgggattttctggaaggtgattgggatatatccgtaggcatggccgaatccgatgatggaggggatcttccagacctcatcaatcaggcggaaatccgtatgcgcgaggacaagaaacagtattacgtcaatggtggaggcaaacgccagctccgcatgctcaacaaccggcttgagaatattttggtgcgcaatgatgatatgaaaatgctgcttgaatatctgaatgtacgttatccggtgtcatttatagtcaatctgaataccgatacgcagcgttcgatcatggtgcccgatttctttcagcgtatgcttgatggtcatgacggttccttccgcgaagcattacgtgagttttgccgtgtgaggattgctcccgaatatcaagaaggactcctgcgactgcttgactacgatgtcgtccgtagccggctcaagtcggaaggtgcagtgcaatgcggttacgtgaagaacgacggtgagcggttcatgttgacgattcttgccgacaacagatccacggacaagaccatgtgggtgttcgaacgtaaggacctgccgtacggaagggcaggttattcgatggatgatggcaccccccccctaccgattcttaggatgacagagattataaaaaattataaaagaatataaagggcgattgccgcgtttgcctgcgtgcggtctggcttgttttgtgctgatcttggctgagcgcgactacccctcagtcggcctgcaaccgataactcccctcaccaaggggagctgtcgttttttactctgcatatgtggatatcgttggtcgttccaccataactagtgcggaacaagggttcgactcgcacattttctgtaggagattgggattggtcatggatcgtacggctatgaagcagcttgaggcttggaagacgtctcgaaatagaaagccgctcattatccgaggcgcccgtcagacgggcaaaacgtggctgtcggaggagttcgggcgtacatgatatgaggcagtggcgcgtatcgacctcatgaacaatgagcgtgcgaggagtttctttgacggcgatctggatgtgagcaggatattgcgtaacatcagcctcgaaacaggtgttcctatcacgacagataccttggtgctccttgatgagattcaagaatgtccgcgtgcattgactgcgctgaagtatttctgcgaagatgctcgtgaatatcacgttattgcggctggctcctacatgggtattgcccgacatgcaggcacttcgtacccggtcggcaaagtcgatacgttgacattgcgtccaatggatttcacggagtaccttcgcgccatcggccgaggaatgatggccgatgctataagcgacggcacaggtattgtagatttggattctgcaaaaagggacctccggcgcgaagcgggcactaccttactggatatggcagtatgggtgtctctttgcccctttcaccatcttgcaataattcttacatgtaagaactctctgttaacatgtaagaattattgcaagatggtgaaaggggatgctcatgttgccggctaaagaaagtttgacagttgagttcaagagcgagcagaagcgccctcaatcgcatgatgaaattgttgacaacgtagtggctctagccaataccgaaggcggcacactgtatctcggtattgaagacgatggcactgtgaccggcgtatgtgacgagcatcgcaatatcaatggacttgcggcactaattttcaataagactgttccgcagcttcccgctcgcgtggcgctcttgtatgagaacgaggtgccgatagtcagtattgaggtgggtaacagtcagcaaatcgtgtctactagtcaagggaagacactacagcgccggctgaaagcagacggctcgcctgaggtcgttccgctgtttgtttcccaattcattagccgtttatctcagcaacggttctacgatttcagtgcgcaacctgccccagaggctcggttggacgatttgaatccagactcacggaacaagttgagaagccatattcgcagtgccaatgcgcaaaactcgttgttgtcttttactgatgaggatttcgatcgggcacttgagctggttgttgatggcccgtatggattgcagccatctgttgctggtctgctcaccattggttcggttgatgctattcatcgatcgattccagccgcatcggctgtttttcaagtgatgaaaggcatgtctccaaaggtcaatatggatccgttcgtgttgcccttggtggatatgtttgatcgtgtaggcgagctgatggagccgtggaatcccagccacgaagtcatgagcggcttgattcgtgtcgatcttccagacttcgatcgaggggcattccgtgaggcaatgattaacgctttctgccatcgcgattatgcacgaatgggttcggtgaggttcctggttgatgatgatgggttgaccatagctaatcccggaggattcatagagggtgtctccgaagataacctgcttactgcacaaccgcgttcccgtaatccgcagcttgctctgattttgaaagctgccggatatgttgaacgtaccgggcgaggtgtggataccatctatgccgggtcgattgcggcaggcggttctttcccggattactcgcagtccagtgccgaagaagtcattctgttcctccgccgtgtggtgcctgacgaggcattcgtgaccatgattggagatgaggagcgtcgacgaggagcaccgttgccagtctggtcgctgattgtgctctcactactgcgcgagcatcgtaggcttactatggtccagttgtgcgatttctcccatttggagcatcgacgcatcgtgtctgctgttgagaatttggtggaagctggtttggtagagggggtcggcagtgggagctctcgctcgtatatgctgagtgcccaagtgtacaaacgttcagaggggttggcgtcttacgtgcgtcagcgtgacatcgatgccacccggcgcagtggccttgttctggagttcgccgaaaaaaatgatggtgtcgtcactacggcggatgtcatggatctattcggcctgagctatatcagtgcataccggttgttgaagaagctcgaagatgtgggcaagttgcgtcgcgaggggaatgggccgtcatcccgatacgtgttgggatgattggcgcgtgtgaaagtaagttctttcatcacctttcaataattctttcatgtaagaactctctgtttacatgtaagaattattgcaagatgatgaaagatgcacacaaaaacggggaagccccgctcacatcgagcggggcttccccatatgcgctggtgtgtagatcagcccgtgttctgcaggccggcagcaacacctgaaacggtgcagaggatcagatagatgaatcctgcctgctggctttgcgagagctcttccttgtccaccttcttgcgtagcgacctgagggcgagcacctgggtgacggacagtgcgtccacatacggcgaacgaatgcggatggcctgaccgagcacgtggcggtgctgcagcggccacttgtcacccacgatgtccagaacccacttgcgggtgagctccatctcctcgagcaccttcttgttgaggtcctcgcggtcgccgagggcgaggtacatcttggcgatgcgctcgtccgtcttggcgatggacatctcgatgttgtcgatgaacgtggagaacagcggccattcctcatacgccctgcgcagcgtgtccagatcgccgaacttttcgcatgcggtgcccaggccgtaccaagcggccaggttgatgcgtgcctgagcccaggagaagatccacggaatcgtacgcagatcgtccagggacttggcaccaaggccgcgcttggccgggcgggagccgatcggcagcaggccgatctcggtcagcggcgtgacgatcgagaaccacggcgcgaaaccgtcggtgcccagcaagtcgaggaaccggttatgggctgcctcatcgagctgagcggccatgtcggcgtacttccgggtcatctcggtgttggtcttctccacgctcggggcggactgcagcaaggtcgccgcggccacggactccacgtggcggatggcaagcaccgggttgccgtagcgggcgaagatgacctcgccctgctcggtgagcttgaagcggcacttgacggaaccgaccggctgggcaagcaccgcacggttggcagggccgccgccacgaccgacggcgccgccgcggccgtggaacagggtcaaatcgatgtcgtgcgattcggcccacttggcgatgcgctcctgagcggagtgcagggccagcgtggcggaggtcggaccggcgtccttcgaggaatcggagtagccgagcatgacctcgagcttgttgccggtggccttgaggcgagcctgcacctcggggatcttgatcatttcctcgagcacatccaccgagttctgcagatcctcaagctgctcgaacagtgggatgacgtcgattaccggtacatcctccgggtgggagaacgccaagcggttgagctcgtagacatccttgatgttctgggcgctcttggtgaaggagatgatgtagcggcgggcggccttgaggccgttgcgcttctggatggccccgagcgcgcggaaggtgtcgagcacctcgtgggtcatcggctgcagatcgccgcgttcgccgtgcagaccatgttcgcggatgtccgcaagggcgcgggcatgcaccacggagtgctgacggaactccatttcgaccatgtggaagccgaaggtctgcgcctgccagataaggtcctgcagcgggccgtaggcggaacgcttcgcgccggcggtggccaacgactgctgcaccaccttgaggtcggcgatgaaatcgtcgcaggaatggtacatgagatcggcatcacgttcgatggtgtagtgcagacggtcggccatcaccagcatgaccgcgcggtgcagttccttgttggagatcagggcggccttgtcggtcagacgctcgctcatctccttctggtggctccagaggctcttgaggtcggcgcttggcggcgtggtctcggcttccatggtgaggttgcggcccaccgtgcgggtgacttcctcaagtgcagcgatcacatgatcggagaacttgcgggccacctgacggctcaccttggcggtgacgttcgggttgccgtcgcggtcggagccgatccagctgcccgggcggaagaacgcggggcacgcgggctccaccaagccggccttgtcgcccagcacccagtcgtcgaagcgacggtagacggccggaatcgtgttgaacagggtgttgtcgaagatgtcgagaatcgtgtccgcttcctcgaccggggtcggtttcttcagcgcgatcggggaggtgcggaacagcgcgtcgatttcgttgtagagacggcgcagactctccttcttgtccaatccgccgaggctcttgtattcctcgagcagttcggagatgcggcggatcttgccttccacggccttgcggcgggcctcggtggggtgcgccgtgaacacggggtggaactcgagccggtcgagcagctccttggccttggccgggcccatctcgttgatgagctggtggtaggcgacggtgagttcgttgatcggatcgacggcctggtcgtcggacacgttgttctcgcgctcatgcagcacggagacgcggtagttctcctcggacaggttcgccaggtggaaatacgtggcgaacgcgcgggccagcaactgggcgtcgtgcaacgtcatatcgtcgatgacgtccacggcctctttcaagccgtcccgtgaggggttcggattcttgacctcggagaaatgcccggcgctggcctccactgcgtaattgcgcacggtgtcgaacgtggaaagcagatcgggattgtattcgcccagtacgtcacgcaggatcttcaaacacagatccatgtcgtacttgaggttttggggaagatcatgctcctcggggcccttacggccggttccggtggtgacgatggcggcgtcagcaggagtgatctgttcttctggtgttgccatataacctcctttgccgaatatcaggttgctcggtctgacggtcgtccgcggctcctccgcggttgttgaggccgtccgttgcgagcccacagcctgtattcaacgtggttgttgtgtaagcaacagtgtatccccacgaaatcaccacttacgttacgaagtccatatagtgcgcagcggtgatgttcatttcggggggcatttgcccgaatattggacaacatatgggacgatgtccgaagcgcggaaaaatcaggcatcaggcgattgccgcaggggtaggcggggagtagtaatggacaacgtgagcgaacagaagaaaaataatgcgcctgaggcgaaaggcgcatcggccgtacgaaaattccacacccactctattccgttggacatggaagacattgcgcgtgactgggataagccggtggtggatgccggtatcgcggccaaggcgagcgttattgtgcgcgttggcatgctggatttgggggccggcactggatcgttccgcgtgcgtgagatgatgcatcgcatcgcctatccattgggcgtgcatgtgcgcgccgatgtgaacctgacggacatcgaagctacctgcaccgatggccgcaatcgcatcaccgaagtcgtggatttgccgactaccggcgtgaacaccgaacgaatctggctgcttgagcattttgccgactggttctccgtgaacctcggtaagggatcgatgtatcacgtcgattcgcagttgtctgatggagtggtcaaacatcttgatgagcgcgatgcctcgcagtattcggctgatctgtccaagcggctgcgtgaacgggccaaggctcgtgccgctgcggccgacggcagcgttgatgatgctttggatgtggcgttgagggccaaggtcacggttacctctgtggctaaatccttggatgatgacaacgaggaagcgcaccgtctgctggcggacagcgagaaggtcaccccgattgaagacaaggcggccgaggaaaaagcctacgatgatgccgaggtgttcgccggcgattccaacgaggcggtcgaggcggccagttctgccggggccgagagcctgacgcggcatgaggcgggaaatgctccggacaatgacgagaacgctgccggcgagccgtcgcgttctgacggttcgggcgtgcgtgcatcggaaggtgacgctgcagatgccgcgactgagccgagttcggccaaacgcaagagtcgcgtgcccaaggaatacgccgaacatttcaacgagcgttccgatgaagagaaggccaagggcggcatcactgtgcgtcaggcacacgagcggctcgatctcatcgagcgccgcaagccgttgtacaaaccgtggttctccggcttagcctccgctttggcttgtgcggccttcgtgttcctgctcggtggtggcccgtatgacatgattggtgcgttcgtaggagcgggccttggccagtggatgcgccggcgactattcgcgcatcatctgaaccagttctttgtcacctttgtatgtgtggctgcggcggcgctcgcctgcacgggcactttgcgactcatcggcatcttcgacccggtcgcactttcgcatgatacggcctatatcggtgccatgctgttcgtgattccgggcttcccgcttatcaccggcggcctcgatatggccaagattgacttcccctctggcattcagcgcgtggcctacgtgctgtgcatcatcctgatggccacgctcgcaggctgggccgtggccgtgatggtgcacctgcacccggaaggtttcgagccgttgggattgaacccgtgggtcaacggtttgctgcggttcgtggcagcgttcgtcggcgtgtggggcttctccgtgctgttcaattcgccgcaacgtatgtgcctgacggccgcgctgattggtgcaatcaccgacacgttgcgtttggaattgcaggacttcagcgtggcacccgagatggcgaccttcatcggcgcattcctggcgggtattctggcctctgcatggcgttcatccgtcaggcgcggctggctgccaccgcaccttggctatccgcgcatctgcctgactgtgccgtctatcgtaatcatggtgcccggcttgtatatgtaccgcgcgatgtggtacctcggcagcttcgacactgtcaatgctctggattgggcattccgcgcatttatggtgattgtctgtttgccgatcggtttggcgatggctcgcgtggtcaccgataaatcctggagatacgacatttagccgttgtgctggctcccctcgggtgaggggagccaggcaacataacatagcgtctcagtatggtgacactggaaggcgcttgagaccttgcatccattaccatcgggcgaagtgcgttgcagtcgtgttcatggttgcggcggccggcacggcgctggttcagcgcccatcacacatcaacacaaactcatgccatggcgatagccgcttggcgtcatgatcgaggaggggcgttggccaacgatttctggattctgctggccatggtcatctattttgcggccatgctgtccatcggattcatctactccaagcgctccaactcctcctccaaggaatacttcgcgggtggtcgcggcgtggggccgtggctcacggcgctaagcgccgaagcctccgacatgagcggctggctgctcatgggcctgccgggcttggcctacttcaccggcgcggccgatccgatgtggactgccatcggcctggctctcggtacctatctcaactggaaacttgtggcccgccgcttgcgtcgctactcggtggtggccggtgacgccatcactattcctgatttcttcgccaagcgattccatgacgagaagggcgtgatttccactattgcggccgtaatcatcttggtgttcttcagcgtgtatgtgggcagctgcttcgtgacggtgggcaagctgtttgccacgctgttcggcttcgactaccacatcatgatgatcatcggcgcggtggtcgtgttcgtctacaccgtggtgggtggctatctgtctgtggtgatgaccgacttcattcagggcatgctcatgttctttgcgctcgcggtggtgttcatcggcactgtggccagcgcaggcggcatcgacaacaccgtggaattcctgcgctccatccccggctatctctccggcgcgcaggtggccgcgcccaagctggacccggccaccggtcagcaactggtcgaggcggggaaggccgtgtttggtgcgccctccgattatggcattatcaccattatttccatgctggcgtggggcctgggctactttggcatgccgcaggtattggtgcgcttcctttccatccgcagcgtgggggaagtgcgtaagtcccaaatcatcgccacctcttggtgtgtgatttcgctgggctgcgcagtgtgcatcggcctggtgggtcgtgccatgatgcccaccggactgttgacctccaccgacgcggaaaccattttcatcgtgctggcgcagaccctgctgccgagcttcatgtgcggcgtggtggtctccggcatcttcgccgcctcgatgagctccagctcctcgtatctgattattggcgcttcggccatgggcgagaacatttttcgtggattgctgcataagaaggccacggatcggcaagtcatgattgtggctcgtgtgacgctggtggttatgttcctgttcggcattgtggtggcgtttgaccagaactcttcgattttccaggtcgtctcctatgcgtgggctggtctcggcgcatcgtttgggccattgatgctgtgctcgctgtattggcgtcgtgccaacaaggccggtgccgtggccggcatgttgtctggtacggcgaccgtgctgatttggcataacctcgtcaagcctttgggtggtgtgtttgccatttacgagctgctgcctgcgttcatcatttcgttgctgttcatcgtggtggtctcgctgttaaccgccaagccgaatgaacgcatgctttacgaattcgaccactacatggatgatccgctgcctggcaccctgccgtccggcaccgtgctcgtcgacgaacccatggaagccatggaggccgaagtccgcagcggcaagtgacgcgtacccgctgcgcggttggcttggcgctgtatcctttggccccgcgaagtcgcatgaatttgccggcttcgtggggtttcttcgatggaaggatacatttagcccgctctgcaaggtcatcgcatccactgatgcctctttgttgaggtgcggctgtctctattgagctattcacgcggcgttatcggaataattggaagcagcggctcgacattcaaacgtttgtatagcggaatacggcgtaattttcgggcatcgctgacctgtcgaatggtctgccgcgtagtgagctgaaccgttttgcccgtgacctcttgtatcctttcggcgactcttcgggcaagagcctcttctcccgcttcatcgccaatgtctaatttggtaacttgaatgtacttccaaccggcatcctctatcatttgacggcgtcgtgcgtcgttcagccattgtccggcgtgatgtgagccctcgtattcgatacatatcttgaattcagggtacgcgagatcgagatgtatgggtctggtgccattgcccacgaatatcggataattcacttgcgggcagtccaagccgtatctcaggagagccaagcgggttcgtgtttccatggaagagtctgtgccggcgcgtgccagaagcggagcccggcggcatttttcatatccgcggaacaggttcgtattggcgccgctctccttatcggcgcgcacttgggcctcggccgtatcgagatatagggaaagattgtctggagtcgttctgcataatcttcgatctcgacgcatcgcggaatcagcgagaacgacaagttcctccagttcgagatatgcggagaacatggcccatgtgcaagctggcgaagtgcatgtgaattgcccttcgaccatgactgtgtctaacgggaaaggccatacgaccactttgacccccacaacgtgtcgcttggcattggcgtgtggaaccgcaacaatggttgcagttgcaaggcctctgtgtttgctcaatatgcggggcgcctcgattgataaaagctccaacgccgttgtcagggcatagggcggtcgccagccgcttcgccgttgcacatctgcacacgtctgcattcgttgatatttctgcattgtcagctctgtcaatgcgattgagctgcccatgatgatcacccccctcgtgatgttctgctttgtgtttgagaagtgtaggggttgactgcccgctctgtctaccgcctcaatttttcggtggatagatgtggataagtcagtggataactgggggtattcgttgaggtctgtcagaccagtgtggctccgaatacattggataagtcatgcggagccctaaatgaggcctgcccctgccccttgcgcacgccctccttaccgctggttctggttcacgtggggtgatgggcgcggggggggtggaacccgtgccctttgtaggtgaaccagcgcgttggtctaacagtcccattcatgttggctgcaggacatccgtgattacaaggaacgcagggatttgcgggtccgatggcggggcaccatcgacggcatgattaagcttgaacggaatccccatggcgttcaagcaaaggtggcatgatggcgggtatgagtagcttggtgcgtattgtcaatgccggtgttccggggtctcaggaccgcgtggacgtggttcttcgcgatggggttgttgcgtccgtcaatcctgccggaacggacctagcctcgcatggcgcaatgccggctggagcgcatacggcattctcggcgcacacgtcgaacgccgctgacaccggcagcgccccgactccaacgccagccgccgcacctgctgacgaaaccaccatcaatgcagatggcctgtggatcatccccggcctgtgggactgccatacgcacttcacgcaatgggccaagacgctgggccgtctggatctcatcaacgctcgctcggctgctgaggcgatggatatgctgcaccgtcacttggacgagcgccgcgccgccggcacgcttgatccggatgccttcgtggtgggcatgcgattccgtcactcgctgtgggctgatgatgagcagcccacgttagccgccatcgacgccgtgaccggcgaccagccggtggccctctccagcgcggacatgcactgcggttgggtgaactctgccgcggctcgcagacttggcgtacatgtggacgaatccggactggtcggcgagctcgaatggtttaacgcctacaccgccttcgacaaagcaccgggcgccgccgaggagaccgatcgtctgctgcgcgaggccgaacaggacaccgcaagcaagggcgtggtcggcatccgcgattatgagatggccgaaaacatcgacacgtggatcaagcgtttcaaggccggcgtcaataacctgcgtgtggatgccggcgtataccctgaacgactgcaagccgccatcgacgcgggctggcataccggcagggaacttccagacagcaacgggctcggccgcgtgggtgccatgaagctcatctcggacggttccctcaacacccgctccgcttattgctccacgccgtattcgggcatcgagccgccgacgtacggcaccctgagctacacgccgcagcaaatcgaagactacatgcgcttggccacagagcatggcttcgacatcgcctgccacgccattggcgacgaggcgaacaccattgtgctcaatgcagccgccgccacgcatgcacatgggtcaattgagcatgcgcagatgctcaagcccgtcgatatcccacgctttgccgagttgggccttacggccagcatccagccgcagcatgctatggacgaccgcgacgtcatcacccgtttctgggccaacccggccggcattccctatccgttcaaggcactccacgacgtcggcaccacgctgcgcatgggttctgacgcgcctgtggccccgctggatccgtggctggctatttccgccgccgtgttcggtaccgagagctctgaccgcgagccgttccagtccgagcagtgcctagatgtgcgtgcctcgctgtcggcttcgaccgccaccggccgtgaccgtcttgcagccggcgacccggctgatgtggtgctgctggacaccgacccatacgccgcaaccactccggaagccatgcgcgccatgccgggacacgtggtgatgacgctattgcgtggtgtacgcacgtattgagcgaaggtcttggtgttcggcggctgtcaccgctcgcctcgacagctatatcgtgtatatcgcgcaaaaagcagcgttgaaatcttgaattgcggttatgagtgtttgatcctccgtttcaaggggcggatttacgcttctgcggaggtctacttccgtttcgaggggccggtcatccactgaacctcgcatagaagcccatctgtgccaacgtcattccgccgttttgtaccgtgtctacttgggcatcagcccctcgaaacggaagtacgggcgcaaaagcagtcacacaagggggagagcggacgttttggacggctatgcggcccgtccagggtgtttgcggcattgcacagggctcgcataaataagaaaaggactaatctccgccatattgcaatgaggaaccgttctgattctgcgctacgaggcagtctgtactcatgcacgcggttccagctatgcgataaagagaacgcgcagacgctagtgcgccaaaacgaagctgggctggacgcccacactaacccatcaacacgcgcggataagacccacgttttgtctatgaacccaaaacgaaagacgccgtgtcagtcgccccgatgggtctgacacggcgtcttgccgcgagcagtgaaagatcagtacttcatgcccatggcctcacgcacctggtcgagggtttcctcggcgatggcgttggcgcgcttgttgccgtcgtgcaggatgtcgcggatggaatccatgtccttggccagtttggctcggcgttcgcggtgcggggccaggaactcgttgacggactcgatgacgtacgccttcagcgcgccggcgccggaatcgccgatctcctcggcgatgtccttcgggtcacggccggtcaccagaccggcggtggtcagcagggcggagacctgcggacgcgcaaccgggtcgaaggtgatgcgacgctcggagtcggtcgggctcttcttgataagcttggcggtctcctcggctgtggcgcccagcatgatggagttgccatatgacttgctcatcttgcgtccgtcaagacccggaatctccggcgcttcggacagaattgcggccggctccgggaacaccggattcttcttggcgtaacgctcgttgaagcggcgcgcaatggtacgggtgatttccacgtgcggcaggttgtccttgccgattggcacgacattggccttgcagaagaggatgtcgcacgcctgatgcaccgggtaggtgagcagcaggccggtcagcgcgtggccggaagcctccatctcggacttcacggtcgggttgcggtgcagctcggcctcggtgaccagggacaggaacggcagcagcagctggttctcggccggcacggcggagtgggtgaacatcatggtcttgttcgggtcaatgccggcggccatgtagtcgagcaccaggttcagcacgttgtcctgaatgtgctcggtggtgtcgcggtcggtgatcacctgatagtcggcgatgatgatgttcgtgttcacgccgcgctcctgcatggcgacgcgctcgcgaatcgagccgaagtaatggcccaagtgcaggcggccggtcggccggtcgccggtcagcatggtgaagctcgacggcttggcctcaagcttggcaagcgtttcgtccgaacgcttcttcgccgcgaggaagctcgcgctcatctcattgcctgccgctgtcagttgctgctcgtcggtcatgcgaaatcctttgaataggcctcagataaacgctttttatggtaaaagtgtgagccgacaacgaacaagccagtattagtggtactctctattgttgatgaatcgaacagcacagtaattcgcagggggtcagatgggccgcggacgtcaaaaagcaaaacagcagaaaattgcccgaaagctcaagtacctgaccaccgataccgattacgatgagctggcaaaagagctaagcgagcaggagccgggaacgggctctcctgacccgtttgccgacgttgatgaccagtatgcggacaaggatgtggattccgctgctgacgccgacaccgccaaggtctcgcccgccgcgcaggcggacgacctcgacgagtacgccaagtgggcagccgaagccgccgcaaaggcgaccagcggcgaattcccggcctccgcgccggccgcgcccaagccgaagccggccccgcgcaagccgattccgatgcccatgccctcagcgctgaagccgaagaagagctgaactccattacttattagccgcggatcgattgacttacgcggcgatatttggggtgcactgaggcgtgctgagacgttcgccgtatcgggcttggaattcttgacgtgataacgcctttgtgcagtttgaatgcgcgaatgccgtgcaatgacgtgcataggggagggaacgtgcctgatatcagcgggcgggatggatcgaagcccaccatgctcatcatggacaacgaccgcatggccttgatggcattgcagtcgattctacggcaagcgtgctgctggtattactgggcattgcgttgcgctggcgcaagcgcgtggtgaatcaggagaacgaaaacgagcggatggaatcggcgctggccgatctgcgccacggcaaccagctcgcgatcgaactgcacgacacgctgtccaacgatctgacgtatatctcgaccatcgcccggaataatctggccgcgccagccggcatcgatggtggcgactggcagcgcgtgctggatcgcagccaacgtgcctttgcggaagtgcatggcatcatcgattttctgaccgagcagagcggaatggacgccggcttccgggacgagtccttgccggtcggtggcaccgggacatctgaggtggcgactgcggaatcagggcaggttgattcgccgacgaaagaatccgccctggctcgtgacccggtaggcgccgggagctgtccagcgattgcgaatgaggtggttgacaatgccgtgcccgagaacgccggtggcgatgaccgtacgcaatccacagcgggcatgccgcagtccttcgtcacgcgtgtgaaggcgcagatcaccgataccgaggagtttctggaggcgcagggctatcgggggacggccgcggtcaacggcatcgccatggtcgtggaccgcgaggcggcgaccgaggcgctgtcgctgataacggagatcggcacgaatatccgccgccatgcgccggcgggagatgattcctacctgctattcgtcaccctgtctcccgaatggattgagattcgcgagaccaacgatatccgtgacgatgccgacgcgcagagtggtctgtccgcgcaggagcggtcggggcgtgggctggccatgcatcgcacccgtgtgcaggagttgggcggtgaattgaccacccgttcggatgatggcacgtggatgatttacgtgcgtatcccgtgcgtgcggggctgatggggcagaagctgcgatgtccggcgtccggcgctgattgtgccctgtcctcacaaatgaggacgacgaccgcagccatgtccccataaccgaggattgcgggtgttcggctcggcggcggctccctatggtggcgtccataaggaccaatcccagggagggcaacgatggcaagtgatacggaattatggcggggaactgattacggatggtggctggctgcggacacgtccggtgcggtcggtgccagcctgatcgcgttcgcggtgccgctgatgatgctcgccacgacagaatcctctgccgccgccaccacgacggaaagcatctgcgtggtggtgcaggcggtgctgggccttgccggcggcgtgattcaggaccggtatgatcgccgtacgctcatgctgatctggggtgcgtccggtgtggtgctctcggcggtggcggcggcagcggtgatgctgttcggcaatgcgccgaagacgagcggccatggggttaacggggtaaacgctccggcattcggcggaccgtatgcccacgtgcttccgatcgcgctgctgtgtatcgtcgtgctgttttcggtgcgcgatggcctgttggagaatacgtcgaatgccatgctgcgtggcgtggtgccggatgagcagctgccgcacgcgatggcgctgaacgacgccagagattcgacggtcacgctggcaggcgggccgttgggcggtctgctgatgaccgtgggacatgcggtgccgtttctgaccagcgcggtgctaagtgtgctgggcatggtgtccgcatggcgtattcgccgctattggaaacgcgcaactgtggatgatagcggccattcaggcaatgccgatgatgctatcgatgtttccggtgccatcaccgctgccccacgctggcgcgacgcactggacggcatgatctggctgctgcgcgaccggttccaacgccatctcatcatcgcggcgaccatggtgaccggtgccagcaatgccttcctactgctgaccgcgctggacatctcccaaggtggcagccagctgatatccgccggattcatcaacgtcgcctccgccgttggcatgttgctgggcgcactgatggcctcgcaactggtcaaccgtgtacccggcggcgtactggtgggtgtgatgttcgccctgctcgccgcaggattcaccggtgccgcgttggtgccctccatggttggcaaggccatatttgtggcctgctcggtactggcattgcccgcgggcaacgcggtgcttggaggcctcagcaataccttggtgggcaaggacaagctcggccgcgttggagcgggcagcatggtgttgcagtacggtgcctatggcgtggccgtggcgctcgccggctggggtatgcagaccatcggctacggtccgacctgcctgattctggccaccgtactggtagctgccgccgcttacgcgctgacgatgcgcagcctcatcaccctacccacgccggaccgctgggccgagcacatccagcgttggagcatcgcacagttctgataaagggcatccgataccgggcatccgacgatttacagcggtagcagatcactcaggtcgtcgcgctcgccgaccgcgctgatgtggccggcgtccttttcctctgcccacgtggtgatgccgcaggccaatcgcagccagacttccgggtccagttcgatgacgtccggaggggtcaggttatgcgggtccgattccgggccgtccaggatcttgaccgccccccacggcgcaacgcgcacctccacgccggggccgggcgcgcgttgctccagcaggaacagcgagtagcgcacagccatcgcccataccgggcgcggcagaacgggggaggtggtcaggcgatgtggtgtgttgtcggccagttccagggctgcggcacgccattgcgccagcgcgtcacgcccgcgtttcaagtccttttccagaattacagccatgcgttctatccttgcactgagccgcgaaagacggcattgtgcaaacgatggcatactgtgggatgcggaatgataagacatgtgatactctctgactgagaacgtatgcaacaactttctgccaacgctgttacggagagttcatgcacacgtttatgcgacgataccaatcgcgcggcataataagcacgggcacttatcccggaaggaaagtcagaatgaccgaaattaccgcaccgaagtctcccgttacggcggaacagttcgccgacgagattcgtgaacaactgaaatacacccaaaacgtcaccgccgagcaggccactgccgccgacgtgtacgtcgccgtctccaaggccgtgcgcaaccacctcgccgattcttggttcaagacccaggccgacaccgtcaacggcaacaccaaggctgtcggctacctgtccgccgagttcttgatgggcaagcagctggagaacgcactgctgaacgctggcctgaccgaccagttcgacaaggctgtggaagcccttggcttcaagccgaaggatatcgtggacgccgaatacgagcctggccttggcaacggtggccttggtcgtctggccgcctgcttcatcgactctctcgcctccctcggtgtgccggccttcggttacggcatccagtacaagtacggcatcttcaagcagaagttcgacgagaacggcaagcaggttgagaccccggattactggctggccaacgaagagccgtggggtcacaccgactacaaccgtgatcagaaggtctccttcggtggcaaggtcgtcgaacacgccgacggcaccaagtcctgggaaccggcctggtccgtgcgcgccgtgccggtggactacatggttcccggctacaagtcccagcgtgtgaacaccctgcgcctgtggaccgccaagagctacgacgagttcgatctgctcgccttcaaccgttccaagtacatggacgccgtggccccgcaggtcaaggccgagaacatctccaagattctctacccggaagactccaccaaggtcggtaaggaactgcgcctcgaacagcagtacttcttcgtctccgcatccctgcacgacgccatccgcgtcttctacccgggccaggacaaaccggacctgacgaccttcccggacaagatcgtcttccagctcaacgacacccatccggtgatcggcatccccgagctcatgcgcatcctcatcgatgagtacggctacgactgggataccgcgtggtccatcaccaccaagaccttcaactacacctgccacaccctgcttccggaagcccttgaggtctggccggccagcctgatcggcgaactgctgccgcgtcacctcgagattatcgagaagatcaacgcgcagttcgaggccgagctcaaggccaagggcgttgccgccgacgccatcaaggacatggccatctacactggcgacgccgtgcgcatggcttacctggccacctacggtggctcccacgtcaacggcgtggctgagctgcactcccagctgttgaaggacgttaccctgaagaacttctccgacgtctacccggacaagttcaccaacgtgaccaacggcgtgacccctcgccgcttcgtcaagctcgccaacccgcgcctgtccgacctcatcaccgagggcctgggcaccgacaagtgggtcgccgatctggaactgctcaagggcctcgagccgctggccaaggacgatgagttcgtcaagaagttcgccgccgtcaagaaggccaacaagcacgcattcgtgggcttcgccaaggaccactacggcatcgatatcgacgagaacaccctgttcaacaccatggtcaagcgtctgcacgagtacaagcgccagtctctgaagattctcgccgtaatctccacctacgccgacatcaagtccggtaaggtcaaggccgaggacatcactccgcgcaccgtgttcttcggtgccaaggccgctccgggctactacctggccaagatgaccatcgagctgatcaacaacgtttcccgcgtgatcagcagcgattcggccgtcaagggcaagctcgctgtccacatgctgccgaactacaacgtcgagatggcccagaatctcatcccggccaccgagcttgacgagcagatctcccaggccggcaaggaagcttccggtaccggcaacatgaagttcgctctgaacggcgccctgaccgtgggtacgctggacggcgcgaacgtcgagattcgtgagcgcgtcggcgccgacaacttcttcctcttcggcatgacggtcgacgaggtggaagcccagtacgccaacggctacgatccggccaagtactacgaggccgatccgcgcctgaagcaggccatcgatctggtggccgacggcaccttctccaacggcgaccgcaacgcctactccccgctcgtggctgactggctgaccaaggactggttcatgaccttggccgatttctccgcctacatgggcatccagtccgagatcgaggccctctacgccgacgagctcgaatggaaccgcaaggccgtgctcaacgtggccaactccggctacttcagctccgaccgctccatggaggactacctcgagcgcatttggcacaccgctccgctcgcgtgattgcggagcgtcctcgcggcgttgctcctcggtcgacgtaccttcgtacgcctttcctcggtgcgccttgaggccgcacgcgcaatcgcgctcgctccgctggcctgatacctggctcctgctggcgggagctggctggcagagccagactgggggtggtttttctgtgaccacccccagtcagctgtgctgacagcccccgccagcgggggcgaagatctagctaaacgccaaagggccctgcaaccaacttcatacgctggttgcagggcccctcgtgtgctgaaagactgtgtgggctatcaggcctcagccggagcctcaactgcaggctgctcgccatcggcctcgtcctcggccttgttcaggcccaagtcaaccggcgaggagctgttctcccacggctcctcccacggatcataatccgggttctgctgcttgtagatgtacaggccaactactgctgccagtgccgcgccgaatagcagtgcgaagaacttccaaccgttagaagacttgctctccatgacggctcctttctgtgaggacatctggtcggtatgcccattcaaaaccgactctgcaccccattctatgtcgtcgtttgtgacgattgggtggggaacacctatcgcatgtattgctcatggcatagtagctccgagcatccggcgcgttggatacagtgggcacatgcatatgcctaccaaacaagaaatccgctaccaatgggagcacggcggcccggtgatgacctgggcgctgattgccgcatgcacagcagtatggctggtggaggtactgctgggtttcttgtcgccgacgttgcagaactggctgatctaccgtggcatgttggcaccagccacaatgttggctgaaccgtgggccattgtcacctcgatgtttctccatgcgcccaactcaatactgcacatcctgttcaacatgattgcgctgtattcggtcggcccggtgctggaacggctcatcggtcactggcgattccttgggctgtacatgatttccggccttggtggcgcgctgggcatgatggtgtgggctgtcgtggcccctggcggccaaggctggcaaacggccgcctacggggcttcaggggcgttgttcggcctgttcgccgcattgctggtggtatatcgccgcatcggggcggatatccgttcgatgctgatatggatggcggtgaactttgcgctgccgtttgtggttggcggtgtggcttggcaagcgcatgtcggtggctttgtggtgggtggcttgctgacatggctgctgatcggcggcatccggccttggcgaggcaaaagccttgcctggcgtatgcaggtgtatggctggtcggtgaccgtgttggtcatcgcgcttatcgtggcgtgcaattttgccaatccatatggctggatgtggcactgataccgttgtggattcttttggagtgatatccaatctttctgttgacttgtgcacaactgtgcatgaaagtgcataaaacggtggataactaatgtggatgagtcaataataatggcgtagtaccaaggttttccctgtggataacttgggatatgaatacagtgttcgcgggtgattccctatccgggaagctatttgtgcaccggttatgcaccaaaaagagcctgttatccactagttatccactatgttttccacattctgtggaaaactacacgcgtgtaattcatccacagcaggtggataacaatgtggataactagtggataaccggtggatagttgtgggtaagtgactgcgcgagggcgaaggaggccggagcggcggcaattgcccataatggaacaacaatgtgccgtacgccggatctgctgacaaaggcggctcggcacccgtagcaagacaaaaacgcaaaaagccggccctgctcgcaagcagaaccggctttcgtaataagacgataggcgaactcagcgccagcccatagtcatcaggaagccaatcataatcagggcgaaaccgatggcaaggttccaagcgccgatattcggaatcggccaggaaccggacggggaaaggtagtacaccacgcaccaaatcaggccaatgatcatcaatgcgcagaataccggaacaaaccaacgcgggttggacttggtgcccttgatggtctcctcaacgcgcttggtgttctccgcctgacggctcatcatgcgctgcatctgcggggtcagcgtggccttgtcggcagtggcgttcaggacagcttcgaccttctccatgtcaacgccgtagttctcatcctctgcagcggtctcgtccgcggcgttctcggacttggcggcctcagatgaggtctcgccctgccagtccttctggtcgttcgagtcggtttcgtgcagctcttcgtcagccatcagcatagtctccattcagtaggctaaaagtcataatagtggctacactcgaaaccagtaaactcgccgcgtataaagatgggaaatcatgtccaggcacgtaggcaaacacagcacgaagcgctctctgctgggaggcgttgcggtgttcgtcgtcgtcgctctgactggttttctgctgagcaccaacgtacgcgtgaaccgtacgacgaccgttaccaatgacacggcagatctggtggaacaaggcgtcagcgaggtcaaccaactgcagaatgacgtgaacgatttgcagcggcaggtgaccaatctcaccgatgtgctgggttccggcgaccggaatgccggcgatcaaagcagccagggagacagcagcgacaacagccttatgatgcccgagctggagggcgctggtgttaccgtaaccctcaacgattcgccgttgtgggaaaccgcagtcaacaacagcggttcgaccaccaacatcaacgattacgtgattcatcagcaggatgtggaatccgtggtgaacgcgctgtgggcgggcggcgccgaggcgatgatgattatggatcagcgcgtgctgttcaattcggccgtaatctgttccggcaacgtgctgtccatacatggtaagaaatacgcgccgccattcaccatctcggccatcggggatcaggcctccatgcgcaaggcgctgaacgattccgaagccatcaccattcttaaacaatatgtgaccgcattcggcatcggctacaaagtggagaacaaggacgatcttaattttccgtccaccgcggccttgctgcagcagctgaaatatgccacggtgaatgagccgcagtccaaggacgaggagaacacccaacaatgaggcacggcaaccatagcagcgacgccagcatcgcgacggataatgtgcctgcatacgcagcgggcgcaggcagtgccgcatcagtgcagccatcgcgcggcggtgactcgcgtcgcaggccatccgctccgaggcacggcgcattatggcaggtgctgggcatcattgcggaactgttgctgatcgccgctgcgatatgcgcgctctatatcgtctggcagatgtggtggaccggcgtggaagccgaacaagcccagaatgagaccacgcaatccgtgaattggtccgaccccagcaacaacggcggtgatgtcaaggtggccgaggcgcaggaaggcgatccgccggtccagcccgaaaaaacggcgtatggcgatctgatcgcacaggtgtacatccctcgttttggctctcagtggcaccgcaacttggtggagggcaccacgctggagcaactgaaccggcacggtctggggcactatcaagacacccagatgcctggtcaggtcggcaactttgccgtagctggccatcgtaatggctacggacagccgcttggcgacgtggacaaactgcaggaaggcgacccgatcatcatccgtaccaaggattactggtacgtctaccattacacgcgccataagattgtgccgcccaccgacatatacgtgattgcgcccaacccggagaactccagcgcggagcccaccaaacgcatgatcaccctgaccacttgcgagccgaagtacagcactccgacccaccgatggatcagctatggcgagctcgcatattgggccaaggtgtctgatggcgtgcccaaggaactggccaccaccgattcgtccggtgaggtgcgttttgccaccaaggagaccccgtccctggtttccaagatcggttctttggacaaggtggtgtatggcgcactggtggcatggctgattctgttcattgccgccgccgtggcctggcgctggccggtgctcaaggcgattcgtctgggcgaacgccgccgccctgatgccagcatctatggcacgctgctgcgcttgcagccaggcgtggcgccaatccgctggctactgctggctgtgctgctgtttgctggtgccgcggccctgttccagtgggtattcccctgggcggccgccaacatcccgttcctacagcaaatgtcgaacttcgtggtgtccaactaggccgtgcgcatgttcgggcgtaagtgcgctgaatcgctgtagtatggcttgcagcataggtttttcaaggagagcagtatgaccgattccgcacgcatcctggtggtggataactacgattcctttgtatatacgattgttggctatctgaagacgcttggtgtcacggtcgacgtggtgcgcaatgatgccatcgatcccgctgcgcccggtgttctggacggctacgacggcgtgctgatttcccccggacccggagctcccgccgaatccggtgccagcgaggatatgattcgtctgtgcgcagccaccggtgtgccgatgttcggcgtgtgcctgggtctgcaggcgctcgctgaggtctatggctgcacagtggatcatgcgcccaccatcatgcacggcaagaccagcttggtggagcatatcgatgatgagattttcgagggcgtggccaacccgatgaccgccacccgataccattcgctggccgttgagcccgattcggtgccggatacgctgcaggtcacggcatggacgcaggatgaccacatcatccaaggcgtgagggtcaaggacaagccgatgtatgcggtgcagttccacccggaatccgtgatgacgcaggatggctaccgtctgctggccaattggctgaaggtgtgcgggcaggataacgccgtagctaaatccgccggattgcagcccaaggtcacgaagtaacgagtaatgattgacccccgctagcaggtatcgctagcgggggtcaatgctcatcatcgttcgcgagacgggctattgcccgtttgttggtgttgccaccactgctgttgttggtattgctactggccccagccttggtcgtgatggtgacagtcgagccttcatcgacctgcgaaccgccagccggatcggtgctgaccaccactgcgttgttgtcgcttggtccgctgacctgtacagtgaacccggctgcctccagcgtgagttttgcagtcgcgtagttggtgccggcggcaatggtcggcacggtggcctgctttttgccggcggatacccaaatggtgatggtgccgccctgttcgatggaggaaccggagccgggctccacgcgggtaatcgatccggcaggcaccgaatcggaattctcggattccacggtgaagttgaatttgtcgttgtactgctgcagcacggcatcctttgcctggcccaccaggttgttcggcaccttggtcatgccggtggacacccacagggtgatcgacgagcccttggtggcggactgcccgttggcgggatcggtgcgggtcaccagatccttggccacggaatcactgtcttcggtcttgaccacggagttcacttcaaagccggcatccttgaggatattgcgggcctcatcctgagtgcgcttggaaacgtccggaatggagatggactgcggtccggccgagaaccatacctgcaccttggaacccttggccaccttggtgccggccgtgggtttcattcgcgtgcatgtaccttccggctcggtggaatcggtgtcacgcttctccaccatcgtcaatcccgccgccttgagcttggcgtccatgccatccttggatgtggatgcggtgcattcaggtatggcgaccagctcttcggtggacgtatgcgacccgttcatggcaaacgttacgccaaccacgatggcgataaccgcgattaatgccacaaccacaccaataatgatgcgcttgcgcttcttggccttggccgcagccgcacgctgctcggcacgcgacttgacgtttgcggcattggcgccattggtgggcgagatctgctcgaattggccggttaccggattgaatgcctgcgtaggctgctgaggctgtcccagagctgcggtcggcaggtcacgctcggcatccctgcgggccttcatattagagaggtcggtcagggggttgaacgcagctgccaccggaacgccgccgttcatataggtcaagacatcgttcttgaactcggaagcagtggcataacggttctggcgatccttggccatggccttggcgcagatcgaatcccacatcttcggcaggcccggtactacggcggaaggcggcgtggccacctcggaaacatgctggtatgcgatggccacagcggaatcgccggtgaacggcgggcggccggtcagcatttcatacagcacacagccggcggagtacaggtcggaacgcatgtccacggtctcgccgcgtgcctgctcggggctcaggtactgtgcggtgcccaccacgccctgcgattgggtcatggtggcggccgagtcgtccagtgcgcgggcgatgccgaagtccatgaccttgaccacgccctgctcggaaatcatgatgttgccgggtttgatgtcgcggtggatgatgcccatacgatgcgagtagtcgagggcgttcagcacgccgagcattacctgctcgcagtcgcgctggctcaaggcgccgttcaccttgatgatgtcgcgcagggtctggcccttgacgtactccatcacgatgtacggcagatgctccacgtcgccgttatcggcggtgaccgtctcctcgccggaatcgtagatgttcacgatgttcgggttgttcatctgcgcgaccgcgtgcgcctcacggcggaagcgggccaggaatatgtcgtcgttggccagatccgcgcgcatgatcttgatagcgacggtgcgccccaagcgggtgtcgagagcgacatggacttcagccatgccgccgcggccaatgagctggccgagctggtatcggccatcggccagtgcagtaggcatattgctgctcattgcttattccctcccaataatgaggccggagcctccataacgatgcgcggtgtgctcgacaccctacggggcagacggctaccggacgtgatcatggtgctgtcggtcatttcggtccgctggtcaagcagacgacgttcgatgcgggccagtgtgcgggacaccaccagagcgtccttaggacggtccagcggatctttggccagcatggacatcacgaattcacgcagctggatatccacagaatcgggcagcggaggcacggcattgttcacgtgtgcggccgcgatatccaccgcagtggcaccggtgaacggacggtggccggcgagcccttcgtaggccaccacgcccagagaatagatgtcggattgcggcgtggcctgctggccctgcgcctgctcaggcgaaatgtactgcgcggtgcccaccaccatgccgtcttgggtgatctgaccctggccggtggaatagctgacgccgaaatcggtgattttcacctcgccgctatcggagaccatgatgttggccggcttgacatcgcggtgaatcacgccgtgcgagtgtgcgatgaacaggccgcgcgcggtctggatgagaatgggcagcagttcgatgggatccatcgcgcccttctcgtggaacaaatcggccaacgacttcgagggcacgtattccataatgaggaatccgatgccatcatgctcatagtattcgaacaaggcggcgatgttcggatgcgccaggttggcggagttgtgggcctcggcacgcagacggcgaagcttggcctcggcattggtcatgtccgaacgcaaagccttgatggccacctcgcgtccgagctggatgtcgtagcctttccagacctcgcccatgccgccctgcgcaaggcgcgcgtcaaggcggtatcggcgatgaatgagctgtccttcgatgagtttcattgctgcagcgcctcctgaatcatcgcgcgcataatcgggcctgcggcgaacgaaccgtacaaatctgtgttatgcaccagcactgcgacggcaatctgcggatcgtctgccggcgcgaagccgataacccagccgtcgatgctgctgttatcgatgccgatttgtgcagtaccggtttttgcggccacagatatgccattgatggcaagcgtcgggttggccttggtaaccacgctttccatcatggtggtgagcttgtctgcagtatccttgctaaacgcctcggccatgacctgcgacttggtttcggaaagcacggtcagatcggaggcgcgtacgcgatccaccaaggtgggacgcatcagcttaccgtcattggcgatggcctgggcgaccattgccatctgcaacggcgtggccgtgttgtcgccctggccgatggaggccaatgccagtttgtcggcggtggagctggacgggaacgtcgatgcggtggctgtcatcggggtgccggtgttctcggtgccgtcaatggtaatggtgctgccgaagccaagcttggtggccatatcgctgaccttgtcttgtcccagagccacgccaagctgggcgaaagcggtgttcgaggaccaggtaatcgcgtcctgcagcgaaatctttccgtcagtgccgttggcttggtacacggcgttcggcagctgggtgttggtgccgggaagcgtgtatgagctgcctgccggaatctgcgtatccgtctggtaatcaccggtttccagcgcggcggatgccacgatggtcttgaacggggagccgggcgggtacagctgtgagatggcgcggttgatcagggggctatcgccgcctgccgcaagctcgttgtacgtcttggtggcggcatcggaatcatgggtggccagctggttcggatcgtagctgggggtgctcaccatggcaaggatgcggccggttttcacctcgatggccacggcggcgccgtccctggtgccgagctggtcgtacgcgacctgctggatcttggggttgattgacgtctcgatggacgcgccttgattggtgctgccggtcagcatggccttggcgcgctgccagatcagcgagtcggcctcgccgctaagcaacatgctgcgcgaggcttccaggccgcgatccgcagtctggttgatggagaagaatccggtgaccggtgcgtacagcggtccattcgaataggtgcgctggtacttgaatgcgtcatttaccggctccgattgagccattaccgtgccgtcggaggccaagatggcaccacgataagcgcccagctgatggtatagggcgcgggcgttgcgagagtcgttgttcagcgtgctggagctgatggccatgatgatggtagatgacaggccgagtaccacgaacagagcgatgacggcggtaaacagctggcgcaggtatttgttcatgcgcgttcacctccgttggatgtgtcgatggggaagttcgtctggatctgcggcaccggtggggcaggaggcatggatggcacctggggcaccgagggaatgaccccggtacggaccgtgtactcgggttcctcagcggtgtttggaatctgcgggtcgtttgcttcctcagacacgtcgtgcggcgtggccgaggctacacgcgggcggacaatgggcttggtggcgcgtgcgcgggccttaagctccttgttgcgtaacgccgcaagcgcttcatgctggaaggtatctgaagtcagctcaggctccggctggttcgctgaattggaaatgacgatcagcaacgccgcaagaatgtagttggcgataagactggaaccgccggctgccatatatggcagggtcaggccggtaagcggaatgacgagcgtgatgccgccgaccacggtgaatacctggaaagccatggtgaacaccagtccggaagcaagcagcttgccgaaaccgtccttgattttcatagcgacgatgaagccggaagcgatgatgatcaggtagagcatcagaatagccatgacgcccaccaggccgagctcctcgccgagggaggcgtagatgaaatcggagttggcgaaggtgaccagagatggatgtccctggcccagaccggtaccgatcatgccgccggatgccaggccgaaaatgccggtgaccagctgccaagagccgccgggggacttggtgtactgttcgttgctgaacgggtgcagccatgcatcgactctcgaacccacatggctgaacatgcttgcggccagcatcgcacctgcggcaaaggcgatcagaccgatgacgatccagcttttgcggcctgtggacgtgtacagcatggccacgaacatggcgaagaacatgagcgaggtacccagatcgtgttgcacgatgagcactcccatcgaggcgatccacaccacgatgatagggcctaagtccttgatgcggggcagctgcaatcccagcacctttttgccgccgacagccagctgatcgcgatgatcgaagagataggcggcaaaaaagaacgcgagaaaaagtttggcgaattcaccgggctggaagctgccgaggcctggaatgcgcacccagatacgagcgccgttgatctctgtgccgataaccggcagcatgggggaaagcagcagtatcagacccaccaccatcgacacgtaggaaaagcgcctgagaacgcggtaatctcgcaggaagacgatgatcagcgtcgaaagcaccaaagcaacgtacagccatatgatctggcgcttggcgatatcccatccctcgctctgatcgatgcgggcgatcatcgtgatgccggtggcggtgagcagcagtacgcacggcatgatggattggctggcatacggctggaagcgggcggtcagcccacagaacacgaggaacagtgcggccgccgcgcacaacatgatggcgtattgcacggggaatgcgccggtggtgcgctggaacatctggatgaacgccagcgcgctgatagccacggcaagcaggagtagcgcaatttggcggaaacgggtagcgatcattgcgatcctcccgcggtggcgtcgtcggctgccccaatgccggactcggacttgttggtattgccggaagtggacgagttggatgagcctgacgagttgctggatgtggacttcttggcctgctcgctctcctgctgcttcttgaacttgttcatttcgctacgaataatgcccacatgcgattgggcctcgtccaaggagcccaccgaaataccccgattgagctgattgcgccaagtctgcggcagattcgacacggtaatcgaggtgctggaaacctcatgagacagcgccaagccgaacagattagtaggcacgccttggtaaatagccactttgccgttgctgttgccgacgtaataccgggtctggctccacatgtacgtgccggtgccggcaccgaacagcaccgccacagccagaagaatggtgatgactatggccaatcggttccgctgatgcttggcacgtgtggctttcttctgctccacatgctcgtccctgatggccttggccacctcgggatcgttcgggtccgcggaaagacggccgtcaggcttttgcactaccggaatttcgccagtatccgggttatcgcgctcgccggtctcctcgcggacggcggagggctgcaccacacgggtggtggatggctcggcgctggctggcgttgcatcgttatgttgtgtgtccgctggctgcatcagtgccgcagcgcgtttggcgggcgaatgatcgtccctcagcgcgggggcggtggccaccggttcgttgacgatatcggcaatcggctccaggttgcggctggctgcgccgcccaccagcggggtctgatgtggcagatcgaaggcgtcggcatccaaagccagcgtggcgtccgcaatcacggcggtgacgttgtcggtgctgccggcgcgtagggccatctgcaccaagcgttgcgcgcattcgccttgatcggccaatgcggtcatcgtctctttgatggtggagtcttccagtacgccgcacaggccgtcggagcacagcagccagcgatccgcggggtgggccttgcgaatggagatgtccgggtgtgggtcgatgtcgaaatcaccgagcacgcgcataacgacattgcgttgcggatggttcttggcctccgcaggtgtgatgcggccggtgtcgatcaggtgctgaacatagctgtgatcgcaggtaatgcggctcaggtggccgtcgcgcagcaggtatgcgcgggaatcgccgatatgcgccactacccagtagccggcgaccaatgccactgcagtgacggtggtgcccatgccggcgagcttgcgttcgcgcttggctttgccgacgatggcgtcatgcgcggccataacggaggtttccatcatgcgggagatgacctcgacatcaccgccggtatcgtcctgctcaatatgagccagagaccggatggcgatggaagatgccgtgtcgccgccggcatgaccgcccataccatcgcaaatggcgatcagatgctcgccggcgaaggaggaatcctgattgttcgcacgcacggtgcccacgtcggacacagtggtggaatacaggaacagcggttgtgaagcggcggaattaggcatgcggctacctcagttcaaaggttgtggcgccgatgcgcacggggacgcgagcgggcagaatggtgggctggctgatgcgctgctgattgaccacggtgccgttggtggagttcagatcttcaatagcccactggccggaactgggatcgcgatagacgcgggcgtggtgggaagacacgaattcgtcgtctaagaccacggtatttgacgcggcgcggcccaagccgatttcggctccggtgagtggcacggaactgccggccagcgggccgtcaataatcaccagcaaagtggggttgacgtttccggaggcaaccggcgcgctggacgaagtggcacgggagaccggtgcttgcggcgcctcggccttctccttgtgcatctctcgttcgcggcgacggcgagaacgagacgggcgcgggctgaacgtctcgatgtctttgtgcaacgaacgtaccgccagccatatgaaaacccacagtaggatgaggaatccatacttgagcagggcgaatgtcagttcggtcatagatagatgactttcgggcggggcgctcgactactcctgcgcttgcgcggaggcccagtacaggatgcgcgtgcggccgatggtgatggtgttgccgtcgagcagcgtggcggcgggaacctgatggccttccacgtatgtgccgttggtggaaccaagatcgcgcgcgattacgccgttgtccgtgatgtcgatttccagatgcttgcgggagatacccggatcatcgatgacgatgtcgcagccggagccgcggccgatcatcgtcttgtctttggtgagcaggtactggttgccgttgacctcgagcacggggctgtcttcggtctgggtgtctgtggtgacaggcacggcgttgccctgcacggattcggaggcgaggttgaagctgcccttggacagatccaggtcttcttcaaagatcactacgaccgggcccacgaaggcataatgctggctcttggcgtactcggtgaggttgtcggcaagctcgttggccaaagtttcgctgccccatgcttcgatgcggtcgaagtccggagtgctcagcttaaaacggtattcattcggggccaccgtgcggtcacggcccacaggcatggcttcggcatcaatttcacgctccagcgcactggagaggtcgacaggctgcaggtctttggagccgaatttggcgaatactccgttgactgcaccctccacgcttttttcaaaacggtcgagaacgctcatagtcctccctttctaatcttcacctatcctacgcggctgtaggaatatggggggtaaaaacaggcccgtttgccggcgatgagtgcaaaatttccaaaaaaaagacaggaaaagagggcgtgatgtgtcgtttggcacatctcagtggggcggaacagccagttcgtggcgggtgcgccccactactggcctctcagcggtgcaaaatatccagatgctggcggttttgccctgctggggagctgccagtggggcaaaaccaccagttcgtggtgtattggcttcgctgaaagcgtctcagtggggcaaatcttccagtatctggtaagacgtctccactgagggcttgctggtggggtcaacttgccatgtactggcagaatcgccccactgagtatgtttcagtggggcggaacagccagttcatggcggttttgccccactggaggggattaggacagcgcctcgcgtaggaagtcgcgctggagcgtgagcagattctcggccaccgtttcgtcgttggtcatatgggtgatgcccgtcagcggcaggaaggtatgcggacggcctgctgccatcaaggcttgcgagagacgcaggctgtgggcgatggtgacgttgtcgtcggcaaagccgtggatgagcatcagtgggcgtgtgagcttcggcgcgtcctgaacgatgccgttgcggtaatacacatccgggtcgaggcccagataacgctcggtgtagtgcgtgtcgtacagcgtccagtcggtgggcggggcgccggcgcatgcggccttgaacacgttcggcgcgtccagcacggccagtgcggacaggaagccgccgtacgaccagccgatcatgcacaccttgtcgaggtccggcatgggaatcgcctcccgctggcgggaggtggcgcgaagcgccggtgggtggttctcggcgtctgcctgatcgcccgcagccggctgtgccgcacgtgattccacatcggcgttgagccgggcgacggcctcgggcagggcgttgacggcctcgacctgatcggccagcgttacgtccttcatatcctcgaagatctcgcggtcccatgccgggccgcggccggtggtgccacggccgtctgccgtgaccaccaggaagccttggtcggcccaccactggccctcccagtagaaggactgcgaggcgatgacctgctggaagccgggcccgccgtacggcttcatcagcaccggcagcttctcggcgtgcgcgtacgggctttccgggctcggcgcgatgatcgccgtgtacagctggtgctcgcccagtcgcgtaaacgtgacgttcggtgtaaagccgggttcggccgccgtggacgcgatagtggcgctctgttctcccagaatatgccgcatctgggcgcgggcggaacgcatatcgcggccggagaccacgatgccgcgctcgccgcgcgaggcggtccactggccgggatcggtcgtgaccggcgtgatcgtgccgttgtaatcgatactcaccacgtcgaaactgcgggcgtcgtggtcgccgaatacggactcggtggcggccgcatcggcccaagcgtccggcacctcaggcgcgatttcgggcgcgcgctgcaccacggccagcacatcctcgtcggtcacggcgagcaccgtgcgcacgttccagccagccggcgtgaacgggcggccgtccattgtcagacggttggtgtccgtggccatatcgttgagcgagcacaccagacgaccatccggcgtgtaggcgggcgtgccgtgaaccaggtcgatccactgctcgttcgcgtgctcctcaagcacacgcgtggcacccagcgcggccccatccgccgcgactgccacctcaagcacctgatcgcgggtctgacggcggttctgcaccagcaccagcggatcgtggccgcgacgccagttcacggcggccacatactcgtacgcctcgcgatcccaatccacatcggcgttgccggtgatgcctgcgtaccggtcgttctcatcgaacgccagcgtgatcacggtcagatacacgtcggcattgcgggtcagcgcgcgcgggtaacggcggccggcggccggcttctcggggtcagccggatcgctgatgtgccaggtcggctcgtcggcggtgtcgaaggactcgaacagcacgtgctgcgaatccggggcccaccagaagccgtcgtatcggtccatctcctcgccggccacgaactcggccagaccgattttccacgtgttttcggccggattgccgtcctcatcctccacgctcacgccgtagacggcggtgatgcggtcacctagttcgccgccgatatcgaccagcatcaggtagctgcccgtggtgtacagcacatgttcgccatccggggcgatgcgcgggttcagcaccggcgtgtacatcgccgggtcctcatcgagccattcgccggccagttcacgggtgtgcggctcgggtgcgccggtctcgtcattccaatcgatgtcggtcaggaacaggcggccgttgatggtgaacacgatgcgattgccgtcgtcacctgcggagtatccgacgatgccggtgccgccttcgcgcgcacgctcgcggcgggccttctcctcggccggcacgtcctcgctgtcggcggttgcgcccagcagttcgcgcggatcggccagcttggtctcatggtgttcaccggactcgtcgaaccagctcagccacagtgcggtcaccagatcctcggggccgtcggagcgcagaaacagggcccgcgagccgtcgcccacggtctgtgcggagcgcggcgcgccgcagccgaagcgcagcgtgcgcgccctgaggcgtgggaaatgcttgattgcgtcattgacatcattggtttcgctcatacctcacaacctacgcgcctgtgcggtcagtggcgcgcagtcttgcgacgcattcccgggattgtttcgcgaagtgggtctcggtaggtccgattagcgcaacattcccgggattgtgtcgtgggtgtgggtgcgaggtgtgggcgtgaggcttgtcctaagatgggaaccatgcaggtgacgatgatcgacgaaaacaagtacgccgaaacgatgaccgacgtggtgctgcccgcgctcgaacaatgccgcgaggagggctggttcgatccgtccgccgccgaacgttcggccgggatcgagccgctgtccggcattatggacaccggcggccgctcgggccagctgcactacctgtgctacgactccgccaaattcgacgcgattcgcgagcaaggcgccaccgccatcttccgcggggccatcgtcatcagccacggcttcaccgagttcgccgagaaatacgacgagctcgtctggtattttctgctcgccggctactcggtgtgtgtactcgagcatcgcggccacggcaagtccgcgcgcgacgtggacaatcgctgcatggtgtggattgatgactggcagcgctacgtggccgatctggccggcttcgccgaaaccatcggccagcagtacgcggccggcatgccgctgaacctgttctgccattcgatgggcggcggcatcggcgcggccgtgttggagcgataccccaccctgttcgacaaagcggtgctctccgccccgatgatcgcccccgccaccggcatgccgctgggcgtggcccgtgtgctggtcggcgcgctgtgcggactcggcttcggcaagaagcgcgtgttcgggcagtcggacttcacgccggaattctcgatggaaggcaacgagggcgcttccgaagcgcgtgaacgctggtacttcaagctgcgttgcgagaaccgcgaataccagacctactgcgcggcgttcgaatgggtgcgccaagcgttgaagctcaaccgggccatactgaatccgtccgcctgcgccgaagtggagacgccggtgctgctcttccagtccggacgcgacatctgggtactcaataagccgcagaatcacttcgtccaactggtcaaggacggcggcggcgaggcgaacatcgtgcgcttccccgaatcgcgccacgaaatcttttccatgcccaacagcacctacaagccctacctcgaaaagatcctcggcttctacgacgaccccatgattgcctgcgccgcgtactgatgtagctcttcacccattgttcaccgtgcggtcaccttgtggcccgacccgctttagatggcgggagagccatggaattatgggcataatgtcttctctccgccgccgcggttgcggccgcggtatgtgccggcgtgctcgcgttgaccggttgcacggcgttcaataattccgatgacggcacagcggacggcaacggcacgtccgccaccacgcagaccttccagccgtccggcggcaaaccgactgccaccctgagcattgcctccggctccgaaaacaaggaagtcgccgtcgccatccagaaagcggccgaccaatccaacgtagccgtgacgatgcactacatgggttcgctggagattatgaacgcgctcaaggccggcggccaggatcacgacgccgtctggcctgcctcctcgatgtggatttcgatgggagacaccaagcacatcgtcaaagacgcggccagcacctccaccacgccgatcgtgttcggcatcgccaaatccaaggccgtcaaactcggctgggctgacgacaccggcgccaccaagcccgtctccaccgcggacatcctcgccgcggtcagcgacggcaaactcacgttctccatgacctccgccacggtgatcgacagcgcgctcaacgtctaccagaccgcgctcaggaaacccagctggaccatttgggtggtcgattactccggttcgatgtctggagagggcaagaacggcgtggtcaaaggcctgaacgcggcgctcgacccggaccaggccaagaagtcgtacatcgagcccgccagcggcgacgtgaacattctcatcccgtttgaaaccgaggtccaccgcccggtcaaggccactggcacaagcaccagcgacctgctgcatgaggccgatgccaccgatgccagcggcggcaccgatatctatgaaggcctgctgagcgcgctcgacgagctgcccagcgagtcggaagcctcgcaatacaccaccgccatcgtgctcatgaccgacggccgctccaactccgatcatcaggacgaattcgaaagcgcctataagtcgcgcggccgtgatctgccgatcttctccatcggcgggttaagggtcaaaatgtgtgtctggctcggcgtgtcgcgggggttagatttggcctttttgaatgccgattgagtgggtgtagtcggtgtcgatagcgttgtcgtagagggctgggcgtcctgtttcgtggtcggcttggttctcggtttgggtcagggtggatactttggcgagttggccctggccccagtcggactgcctggcgattcgtactggatcgtcaggcagttccgtttttaagtagagccaccaatccagcatgcggcgttgtcgttcgcctgatctgccgcggtgggttctggcgagcagtttgagctgggcgttgatgccgccttctaagctgttggtggtggatttgatccgctcgggcgcaaggactcctgctggcgggttgaggtagacaaacagcatctcggaccgccaaagatggttgaggctgttgtaggccttgcgcacgttgtggtgggtccacacgcgggtccatgcacctgttttggggtctttgatcatggttttctcgttcatccattcccggtagatcgttgaaaactcgtgcagttgcacaccccacgcggcggcttcatccagtgtggtgatccgggtcagtttcagcgcaagtcggtagatggtgcgcccggcatcggtgcgtgggttggtggtggtgtagcggcggaccacgcgttgggcgtggacgaggcagcgttgaattttcgtagtcggccagcactttttgattgcgctgtatgcgccttggccgccgtcgatgacggcgatgagtggggcttcgatgcgttcaagcagcagttggtagtcgcgggtggtttcgtgtttgcaccagtgccaggcgatcacgtggtcgatggtcgccgcgacgatcaggcagccaccggcggtgtaggtgccatcgagaaatacctggtcgtagatccgcttgtggtggccggcggtggggtcaggcacatcaacgagccagcaccacttgaagcgccgcttcatggtggcgcggctaacaccgtttcgtttggctaggtcgtcgagtgatattgcggtggtgcaatgctcgatgaactgggtgaacactgccgcgttggtgatgtcgtttcgacgtttgacgctggaggcgccgcattgtttgcagcgccatctggtggtgcctttgctggtggtgccgttgcgtttcatttcaccgccgcagtggcagcgtggttggttcttcgacattgcgacaccacaccacgccgcgcatagcacatcacggctgccacaccgaggatttcccgtcgggggctagatatatgcttccggagcatatactttccggaaacctacaggtcaatccgtgaaaatccgcgattccggacacactttttgacccttaacccagattgcacgcgtggggattgagggtgtgaatcccactgtcgtgggtttgatgaggtagtcgatgttgcggaagctttggcatcggcgtgcgttgtgctccgtacgttgtttcaaaaacgggtttcatcaaacggaacaaaacctgggacacttcatatcccaccccaggcctaatgacttgggtgcagcggcaacgctcatccgatttaggcagagtcgttgcaggatccagtgggtcacctggtccgtggtctttgaattgtcgggcgcgcaggcaaggccagcacggaagatcttctgcaagcaacgcttgttggtgcaccggtagcgtggaaggcgcacatgaagttgttgggtggccgacgatgggcagatcgaccaggctgcggatgacgtggtcgcggaatactccaggctgcccgcaggtagggcattcattgatcggctcgacgggttcggcttcaataacagtgacgtcaccgttttctgtggcaccggtgatagtagttcctagttttgcggtgcggcagatggtatcgacgatgacatttccgttaggctgcacagtaggtccttagttttgtacggatggattagatacctttttcctacaaagccaaggaccccaatatcttgtgccacgcccgaacccccggcgaactaatcaatgcactctaaaaccggaagagcccttttagtactactggtggatttcggttttggtggggattaacgccgccggcttcggtttttccgttgaggaggtcgttgactacttcccgatggtgaaatgggtcgatggtgaggtagagaggaaccagtcacctggaagagatcgatccagtcgttggtgtgcaatctgggaggtagggtcgcggggtcgattcctcgcgagcgcaaccatgattgtgtttctgaacgtgatgaaaacaaccctgcccttcggagaatttcccctatcccgcgtccccgggcagtgaaaacggtgtgcaccatcgcctgaaaggctttgcgctgctctatcggaatcttcgggtcacccacccggcggatcactaagatccccccgtcaacgtttggctgtggccggaaagcagtccttggtacccgagaacccaggtgaaatgtgaaccatggggaccactgagccgtcatcatcgtgcttgcgcctaccccggcccggcggcgagcgacttcccactgcatgaggagtacagcgtcagtccatgctggcgcatgcagcaactttcgaagaatggcagtggtgaggtgaaagggaatgtttcccacaatgacgcagggagtggcgggtaaccggaagttaaggaaatcatcatggaccacttcgaccgccgccgaggaggtttcttgtgtgattttggcagctagttttgcgtccacttcaactgccgttatcgccctccccaagtgggccatcgggtgagtgagggcaccgcttcctggtccgatctcaatgatggggccggaggtttgtttcacaaggtcgatgatggagttgatgatcttgtggttggtgagaaaattttggccatgctcgtgacggccgtgtccgtatgcagacatcaggtgtgctccttggatttgaaagggagccgggcatgacaaatagccgcccggctaaaggaccggagcggtttttaacctacggggtaggaaaccgccttagcggttggtgcgcaaccgcaaggaagcggtacctgaaatcaacatgggtctaattatatccatttaaagggttaagggtcaaaatgtgtgtctggctcggcgtgtcgcgggggttagatttggcctttttgaatgccgattgagtgggtgtagtcggtgtcgatagcgttgtcgtagagggctgggcgtcctgtttcgtggtcggcttggttctcggtttgggtcagggtggatactttggcgagttggccctggccccagtcggactgcctggcgattcgtactggatcgtcaggcagttccgtttttaagtagagccaccaatccagcatgcggcgttgtcgttcgcctgatctgccgcggtgggttctggcgagcagtttgagctgggcgttgatgccgccttctaagctgttggtggtggatttgatccgctcgggcgcaaggactcctgctggcgggttgaggtagacaaacagcatctcggaccgccaaagatggttgaggctgttgtaggccttgcgcacgttgtggtgggtccacacgcgggtccatgcacctgttttggggtctttgatcatggttttctcgttcatccattcccggtagatcgttgaaaactcgtgcagttgcacaccccacgcggcggcttcatccagtgtggtgatccgggtcagtttcagcgcaagtcggtagatggtgcgcccggcatcggtgcgtgggttggtggtggtgtagcggcggaccacgcgttgggcgtggacgaggcagcgttgaattttcgtagtcggccagcactttttgattgcgctgtatgcgccttggccgccgtcgatgacggcgatgagtggggcttcgatgcgttcaagcggcagttggtagtcgcgggtggtttcgtgtttgcaccagtgccaggcgatcacgtggtcgatggtcgccgcgacgatcaggcagccaccggcggtgtaggtgccatcgagaaatacctggtcgtagatccgcttgtggtggccggcggtggggtcaggcacatcaacgagccagcaccacttgaagcgccgcttcatggtggcgcggctaacaccgtttcgtttggctaggtcgtcgagtgatattgcggtggtgcaatgctcgatgaactgggtgaacactgccgcgttggtgatgtcgtttcgacgtttgacgctggaggcgccgcattgtttgcagcgccatctggtggtgcctttgctggtggtgccgttgcgtttcatttcaccgccgcagtggcagcgtggttggttcttcgacattgcgacaccacaccacgccgcgcatagcacatcacggctgccacaccgaggatttcccgtcgggggctagatatatgcttccggagcatatactttccggaaacctacaggtcaatccgtgaaaatccgcgattccggacacactttttgacccttaaccctgttcggcgatgccgatcccagccagctgaagtctctcgccaccctgagcaacgccaaggtattcgacggccgctccggcgacctcgccgccgtcttccgccaagtcaagggcttcaactgatgctccaggtaatctgtggattcgttgtcggactgctgctcgccgggctcggtttcggactggtcggcggcggagtgcccggcctgatcgtggccgtggtactggccgcacttgggtatatcgccgcctccacgctcaccgagccggagcgacgcatcggcaaaatgctggtttccgccttgcccaacggtcagaagaccgccgatacgatcgacgcggcgaacgctcaactcaactcgatcgccatgctcaccaagcaagtacgtgacccagccgtcaaagccgaagccaacgacttcatcgccgctaccaaagattgagtgcaatacgtgacccgagacacctccgcctacccgacgttgcgccactacatcaccgtgtacggcgagcagaccgagaaactgttgcgctcctacgtggacgtggaaagttccggcgcacgcgatcagatagccacggtacgaatcgaaaccatcgaggcgctgcaagtgctcgaacagaccgccgccggcgaactcagccgggcggtaagcgccaagacgttgggcattacggccgactccgacgccatccaacggttggcccgcatggatggatacgacgacgtcgcaccttcgcctgtgccttcctcggctgctgatgaaggacggcatgcacccagtcagactccatctggcggcccggctcaccagtcggaccagaaaacggacgcacaatgaaactctccaaatcaaaaatcatcggactgatcgccctgcttgcggtagtgggcgtggtctgcggcacgctggtgtggcggcaatcgcaaccagcgccggccgaaccgaccgaacaggtgagcatcaccggctacctgggcggcgagaaaatcggcctgttcgatgacgccaagttcaaggcgctcgccgccaagcaaggcattgccatcgactatcgcaaggccggatcgctggccatgatggatgcggaccggaaaggcatggattacatgttcccctcctcgcgcgcggccgtcgaatacggcaatgcgaaaggcgtcaaggccccccaaagcgacatcgtcttcaactcaccgattgtgctatacacgcacaaggccgtggcggacgggctcgtgaacggcggacttgtgaccaaggacaattcgggcgcgtatcacatgtgcttgatttggccgtgaaccagacggatgcgttcaagcagatcaaggacgacgtggtcatcgtctacccgacgccgaccgtgtggagcacccacacgctgatggccttggacgagaaaggcgacacactgctgaacctgttgaaaacaccggcggcgcagaagctggcgtgggagcgccacggcttccgcgcggccaacttcgccggcaccgattcgatcagccgattcggcgtggccggcacgctcgaccagatcccggccgtatccgaactgcccaacaacgacgccatgcaacacctcatcaccaccctccaatccgcgcaagccaaactcgtggccgacatctccatgtacgacacgatgtacacgcagaacgcccagcaataccgcgagctgaaaatgaccgtactggccggcaagaaggcgctcgccgacttcaacgccaaccagctgccagcgctggaggccgaggccgccgccagtggcgacgccatgcaggcgcaagtgctgaaggacttcaagtccaagctcgaccgttttgccaagcgactcgacgacctcgaccgcatcagcgtggttaccttgcagaccgcgccgcagatcaaaatcatccagaacgcggaccagaccatcgtggacaagatcgacaccaccatctccaccacgattccggtgtggaagagtcagatggtgatcgcgctgggcctgtccaaccagcgcaaggttctcgacctgcagaacaaggccgacgatgtgaccaacaagctgctggcgcgtaacgcggccgccctgcacaagggtgcagtggacgcggaaaaggccaaccagcgttccgtggtggaaatcgacacgctggagaagatcaacgccgaactcatcgccaccctgaaggagaccgtgcagatccagaaggaaggcgaggccaaccgcgagaccgcccaggtcaagatgcgccaaatcgagtccgacctcaaaaacgccttgctcgaaaacgcccagcagatgtgagccgttcgcgcgccagcatgctcccgttggcggagtttgcgggaacgtgcaaccatgctcccgttggcagaggtatatgagtacgcctactggtgtgcgtatatatgctcccgctggcgggagctggcagccgtaagactggctgagggtggtcacggcgctcggctcggccggctttaccggcaactattcccgccgcaatttctctgtgggcataatcccggaatgattgccgcgctcgggaattgggtgaagtgaaggttaaaggttgagagcccgggagggttccggaaccggccacgataaccgctgctagccccgcgatacgggttggcggccggcagccaagccgattctctcctaatcaaggagtaccgattatggcaatgtttccggctttgatgaatgacacgatgttctcggatctgttcgatgatccgttctttgagggttggcgcaacacggacaacacgatgagtgccgtaatgcccgccaacatgatgactaccgatgtgcgcgagaccgataagggctacgacgtcgacatcgatatgcctgggttcaagaaggacgacatcaaccttgagttgaacaacggctatctgaccgtgtccgcgtctcgcagcagcgagcatgaagacaaggatccggctgctgaaggtaaggactcggatgagcagtgcgcttgcgcgtccgattccggcaagtggctgcgccgcgaacgctacatgggttcgtgctctcgtagcttctatgtcggcgatgacgtgaaggaatccgacatccacgccagctaccagaacggcacgctgtgcgtccaggtgccgaagatgcaggctcagccgcaggttgaggccaagcatcagatcgcaattgagggctgattgagattgttgcgctcagtctctcttgaagcttagcttcgtagtgtgcttgcccggtgtccagcatcgggcttgttgcccccctctgacgaggaggctgtcagcgaagctgactgggggagagattagcgcaatcgattgcaaactagactctgttccctgcgctgtctgtcctacgctttcaacaccgactattgtgacagacggcgggaaacatagccaatacgaatgccggatagggtgtatgccctacccggcattttgctgttttgagcaccctgttttgccatgttcttattccggtcgtgtgccgttctgccactgtacatatccgatgggtagagtgacttcgaaacgaggcaagagaggacatgcatatggcagacgacgcgcgcaacgcaagcggcacaccggtaccgacggcaagtcatgccggccattccggcggacatgttgtttcctcccgtgccactgcggtcggcctgatggcaattgtgctgtggagtttcatggccggaacggtgcgcatcgtcgccgaaagcttcggcgccacgctcggatcggccctgatatatacggtcggcggtgttctgctgctggtgtttcgccgcccggcgccaatccgtgagttccccaagaagtatctgattatcggtggcctgctgtttgtgttttatgaatcgtcgatttcgctttcgctcggtttggcctctacggccgcttcgtcggtggaagtgagtctggtcaactacctatggcccacgatgatggtgcttctggcggcgggcgtatcccgtcgcaggcatgcggtgtggaaggtgctgccgggcgcgatcgtggccacggttggcgtcgcgctggcggttggcggtaattccgggcttgactggcaggcagccgctggacacatagctgataatccgctgccgtatgtgttggcttttgcgggcgcgctcgcatggtcggtgtatgcggtgttcacgccggcctggtcacatggagtggatggcacttcggtgttcttcccgtgtgtagccgtggcattgtggattatccattttgcttccgggcagggctggcctgcagagccgccgagtctggtcgcatggctgttcgtcttcattgcggctgccgcaatcggcggtggctatgcctgctggggctacggcattctgcacggctcgatggagcggctggccatcgcctcctatgccacgccggtgctctccactggggccagtgcggtgctattgggattggcgttatcgttgccgttctggtgcggtgcgttgctggtggccgctggttcggtgctgaattatctggtcagcgcgcgtcgctcagaccccaccacgtagtgaaatctccaccacgatgtgaattgcccaccacgaggcgtctcaaaacggcttaattccgcgaatcatcaaatcccgctcaccgcgtggtgggctttttactacgcggtgggaggttcaccgcgtagtggaattaaccataatcacttgccccggcgctcggacgggcggcggatcgggtcaagcagggcgtccggattggaaatgccgaacatgctgcgtccgctggtggattcagggtgcttggcgaggatggccagagaaatcgcacccggaaccagaatgatcacggacagggcggccaatccccagttcacaaaaaaatccgaggcacagcacgataatcactagaaccgccacggtgccgatgatggtcaaccatgcctgatgcgggttggagacgcgggtctagtaagcatttttggccgcagcggagctggccttggagggcttgctggcggaagccgggcgttgttcgttcgtgttcgttatacctgccagcatatgccctgacgtctgatgatgcgttccggacaaagtctgaataaaggttgagaactctcgggatgttctgtgaaatccgacactcttccctgaattgcgcgataggcttacatgagctcttgggaagcgtgggggtgaaggtatgaggaactccgtctggaagacgttgatggagctgtcgctgattcggggaatcgttcctcagaccgtattcggcgtgaccgcagtggcggcactcgtattgctgatcggattggttgtgggcaagcggaaccgtgcgcatcgcatgcacccgctaatcgtgtcgttgatcgtcgccgtggccgccggtgctgtaggcctgttggcggcatggttggtatccgacgtgttcatggcattcgaggtctcgctcggctggccggtgatctttaccatcgccggcggcatcgcggcggtcggcttcgtaattgcctcagctgtgatcgtccaaggactgcgtcgcgtcgtcgccatcattctggtgccgttgatactggtctccacggcactcggcgtggattcgatctatggcgaataccagaccattggcaacctcgtcggctattcgccatatgcttcgctgagctcggtcaaagtgcacgaatccgcgatgagcgtggaccaatggcgtaagcgtgcccagcgcaacgatttgcccgacatgccgcaaaccggcaaggtgcttactgtcaccattcccaatacgaaatcgaacttcgccgcgcgcccggcaatgatctatctgccgcccgccgcgcttagcgagatgcctccgacgctgccggttatggaactgatggccgggcagccgggcagcccgagccgccttatcgacgcgggcaacatcgcggcaatgatggactcgtatgcggccaagcatgacggtctggcgccaatcgtgattgcgcccgaccagaatggtgaggtgtcgcataacagcctgtgtgccgacaccacccaaggcaatgccgagacctatctcaccaaggatgtggtcgtgtgggccaagaggaatctgcctgtggccaagtcggcgaagatgtgggcgattggcggcttctcgcagggtggcacctgcaccacgcagctcggcccgcgtcatcctgagttgtacggcgcgatgctgccggtggacggtgagctcaagccgacgaatggtacggtcgccaagatggtcaaggagtatttcgccggtgaccagtccgcttatgacgcacaggtgccggtcaatgtgattgccgccaccggctcgtcggaccaggcgctgttctccggcgcgggcgaacgggataaagagtcgatacataatatgcgtctgattgcccaagccgcacgcaaagtcggcatggacgtcaccgaactggtcgtgccggataccggacatgactggcatgcggtgcaagccgtctggcgggccgggcttgactggttcggcgaacgaaccggattgggtgagatgccgcaaccgttgaaggactacaaccaagtggaggtgttgcaatgagcgacgaacagcagcatgagggcggcaggaagccgcagacctcgtatgcgtccaagtctcatgcgccgaaatccagccatgttgcggacagctggcgtgaactggccgaggacgcgcggcagtgggcggatggccataggctggccgttgtggccacgacggtgctggtcgtgctgaacttggtggtatggctggtggccgccatggccagattcgcgttcccattgcgcctagacaccagtatggccgagttcgatctcggcaaactggtgtgctcgttgttcctggcgcgcggcgtgatccagctcatcattgatgccgtgctgtggctcgtcatgttctccatcgccgagccatggctgggtcgcacccgcaccgttgctgctgcgctcgcctgcgctgctgcaggcgcgcttatcggccttggcctgtgcgcggcggccggttggctgttccaggattcccggttcgtctcccgcatgcagtttgccctgagcccgctggtgctgccggtcggcgcattgatggcggccagcgccttctgtggccacctgtggcggcggcgtatccggctcatcggatatgtggcgattctggtcgcgctgctctacagcggcaaccccggcgactactgcattctcgccgccgcattgctcggtcacatcgccggccgtgtgatggccggtccacccgcgcacaccgaaaccggctggcactggctgcgtagcacttcattcgaagcgcgtcgcatgttcgccgccatcgccgtggtgctggcgctggggccggtcatttccatcacctcgcataatcatgccgggccgttgagcacggtcggcctactgatgagcccggcttccgtcgacaacggcaccttggccaaatgcttggccggagccacgcacagcggttgcttcctgcaattcgacctgttgcgtgcttcgatgcctggcgcggttctgcgctcgctgctgcccacagccgtgaccttggtgctggcatggggcctgtatcgcggtcgccggtttgcggccatctgcgctgtggccatcaacctgttcactgcgggcgtcgccattgcctattatctggtcgtgccgctgagctttgcaccgaacggtatgacgtccttgctgcagcatggcgcgattaccgcttgcgtggcgaatgctctgccaccgttgatttttgccgtcgccttggctgcgatgctgaagcatttcccgattcgtgtcggctggcgccggctgatcggcggcgtcggtgtaatcgtgctggccttactggcctgcgccgccgtgtaccttatgtacggcatcgcccagccggacgcgtttgcgcctcgggccacggcgtcgtcgctgttggccgaactgccgggacggttcctgcccatcgggttcctgagccatatgaagttgtcgttcgtgccgcgtacgccattggcgtccgtggtgtatcagggcgttggcttggtgttctggatcgtggtgctggccgtggtgatgcgttggatgagcgacgtcagtgagtcgaatgaacgggcgcaggcccgtgccgaacggctggttgagaccggcggcgaatcgatgagcttcatgaccacgtgggaaggcaacgactattggctgtcgcccacgggcaaatcggctgtggcataccgtgtactcaacggtattgcgttgacctgcactgggccattcggcgatccggcggagtgggtggacgatctgaccggattcacgcagtattgcgtggaacggtcgtggtcgccggtgttctacagtgtgcatcgcgagcagcgtgatgcgctgctggctgagggatggaactcgattgaggtcggtagtgaaatggttgtggacccgcgtgtgtggaagaccaccggcaagaaatggcaggacgtgcgtaccgccatcaacaaagccaagcgcgacggcatcaccgatgtgcagtccacgttcctggaatcgccgctggaagtgcgtgagcagattgaggacatctccgaggaatgggcacagctcaaggctttgccggagatgaagtttacgttgggcggtgtcgaggaactgcgtgacccgcgcgtgcgtcttctgtatgccgtcgatgcggatgggcgtgtgctgggcgtcaccagctggctgcccacatggcgtgatgggcgcgtgatcggttggacactggacttcatgcggcatcgtaccgacagtcctaacggcatcatggagttcctgattgcgcgtatggccgagcgtctgcgtgatgagggggctgcggatccggagcatgccgcagaattcatgagtttgtccgcggctccgttggccggtatgaaccccgagcgggacaatgccggcgaaggtggtgcgccggccggggaaggcacacaggtgctccagcatgcgctgcagatcgtggccgattggatggagccggcgtacggcttccattcgttgttcaacttcaagcgcaagttccagcccaccgaggcaccggtttacgtgtgctacccggacccggcggcattgccccagatcgggctggccgtggtgcgtgcctacgtgcccagcgtgacgcccgccgaagtggccggcatgctcagcacgctgcggtcgtagggtgtggggcgtacggaccctgacaattgtgttcgcggttgaggttctaggccgtttgcctgttcgtttacgtacggaccggagactggccgattcgagcccaagatggggctatctgctttcaaagaggtaccttcagcttcttgcggatagctaactgccttcggaggggtacctgaaccctgaaatcccaagtatgagcgttgcaatgacggcgtttgtactcgggatttcccatattcggtacccctttggacggagatagcattccgcggaagcccgaatatacctctttgaacggagaaaccccagctaggggggcatagaagtcgctatctccgtttcaaggggctgattcggcctgctccggaggtctactctcgtttcgaggggctgatgccgaagtattcacgctccgaaactggcggaatggcgttggcgcagatgggtttctacatgcgttctagtggatgactagccccttgaaacgaaagtagacctccggcggaggccgaatcagcccctcgaaagcgtttttgccgttgcggagattttccagccgtaccgtgaaccgtctcaacggtgtaacgtgggacgcatgagcgaacttaccgaacataatgacggcaacacgcaggtcgcatacttcgccggtggctgcttctgggggctggagcgctacttccagaacgtcgacggtgtcacggacaccacggttggctacgcgcaatccacggtcgaatcgccgacctacgagcaggtgtgcgcgggcggcacggatgcagctgaaaccgtgcaggttactttcgacccagcacgggtaagcctgcggacactggcattgctgttcttggaagtcatcgacccgttctcggtggatcagcagggcgaggaccgcggccggcaataccgcaccggcatgttctacacggacgagacgcagcgtgccgtgtacgtggcggccttggagcagctggtcgaccgtcagccgcagcgcccggccgtgttggtcgagccgttgcgtaatttctatccggctgaggcccaccatcaggattatctggtgaacaaccccggcggctactgccatgtgccgattgcggcgattgcgaatgtgaagcgtcgtcagaagtatgtggagcggatttgggatctgacgctggaacagtttgcggtcacgcagaacgccgccaccgaacgcccgttcgtcaacgagtatgacgaggagttcgagcccggcatttacgtggacatcgtcagcggcgagccgttgttctcttcgcgggataagttcgactccggctgcggctggcccgcgttttcccggccgattaagggtgacttgctgactgagcacgaggatcatcgcattccggggcgtgatcgtattgaggtgcgcacttccgacacgcagattcatctgggccacgtgttcgccgatggtccggccgatcgcggcggcctgcgctactgtatgaattccgccgcgctgcgattcgtgccgcgctcgcgcatggccgaggagggctacggcgactggattccggccgtggacggggaagctgacggtccggtcgggaagaccgatcagcctggggcagctcacgaacggtaagccgcgactgcacgagctgcatgagatgtggtattttgctgaatataagcgccgaaaggaccggacagcaacatgagcatggagaacattgcgggcgctcgcaaacctgccaagcgtgaggatgaccggacggttgccggcgagcatcgtatgatgcgtcgcgcggaccgtgaggtgaccgaccccgagcagatcgctgcgattatcgccgcttgcgacatcgtcgaagtggcatatgcggatgctgagggcctggccatcgtgccgttgaatttcggatttgattatgagtatgacgaggccgatggtgttgccgcaacagtcttggtgaacggtgctgagacggtcggcagcacgggagtcgtggcagccgatgaggtggggtgccccggcaaactgacgctctggttccattccgcgccgcacggccgcaagctcgacgcgattcgtgccgcagccggcgggcgtctgcccgtggcattcaccatgcaggccgactgcgaggtggtggcgggtcgcaccacgtgcaattggggcgaggcgttcaagtcgattgtcggcaatggcgaggcctcgctggtcaaggatttgggcgaatgccgccacggcttgcaggcgctgatggcgcagcaggcgcacatgccgcacgtcgaattcaccgacgcgcaggtgcgcagcgtcacagtgtggaagatcgaggtcgattacttcaccaccaaggtccgtgccaagcccgcgcccgcgcacatgcatcagcgccctgccgtgccgcgcgcaggtgtgatcggtgcccgataacatcattgcagcaaggatgggatgtcggttgtggtgcggctcaacggttcttaacgtaccgggtgctgcggccggcgcccagtttggtgatggtgccgttgtcaagcagtgtcttcagtgtacgttcaacagtgctggcgctgatatcgggcaattgttgaagtatgtccgcttttgagagcggcgataatgtgcgatcaaatagattgccgatacgctgctccttggtgggttttctattgctgccccagccggacacttccccaatccgttcgtcgaactctttacaggcagtgaggatgacgccgagtaaatagttcacaaatggtgcatagtcgttgacgttgtcgttccagccgtatgtgctcgcggcaagtgcctcgtaataggtgtttttggtccgctcgataaggtgttcaatgctgatatatttacctacttggtaaccattgcggtagagcagtagcaaggtcagcagccggctcattcgaccattgccgtcattgaatgggtggatgcaggtgaagtcgaaggtgaacattgctgtggcgagcaatggatcgatatgtccgtcttggatggcttctgtataggcggcgcaggcgcgctcgacgagctccggtgtgatgagtgcgtttgggggcgtgaaacgaatgatttgttttccggtggcgtcgcgctcgatgatgacattgtcgctgtctttgaaatgtccgccgaaagcgaggccagtgtatcggaacagatcgcgatgcagttggaggattgtatttggggtcggtggaatgtagtcgtggctttcgtggatggtggtgagtacgtcgcgatagccggcgatttcctcctcggcacgattgcgtggcgtggttttttctgcaaccagtgcgttgagtcgcttgtcactggtagagataccttcaatacgattggatgcgttggtgctttgaatgcgtgcaaccgtgatgagtgtgttcagcaaatcaggcctgattgcagcctgtacgctttgacgacctttggcttcgtggatggcggatagcagtgttgtggtttgtggggtgagcagtcccttggcggtggtgatgtagtcaaagtgcttcattgcgagtctctttctgcatcatcaaatagttttctgcatcatattctatcaatatgatgcagaaaaaacgatagatgatgcagaaaagtggattgttattcccttgatgatggtgttgctcaaatctcaccttccgctggcgggaggtggctcgcagcgccggtgggtggtttgctctcgaacccgatagacttgccgcatggcagcagtgacagtggtaattaccagttgcaatcagggtccgttgattcgcgaagcagtcgagtcggcattgtcccagacggttcgcccggaacgcatcatcatcgtggatgatgggtctgatgatcaagcgtccgtcaatgtgttgagtgcaattctcgacgattgccggcatggagtgccggatacgggcggtgtcgccgtcgatcttatcgggcaggtgaatgccggtccttccgccgcgcgcaatcgtggtgtcgccgctgccgagacgccgttcgtagtggtgctggatggcgatgaccgtctgatgccgaccttcattgagcgcacgttgccgttgcttactgctgatgattcgatggtcgcggcctctggctggctgcgtacgttcggggttctggactcagtggtccaaccgatcggtggcgacgcgggggcgttcgtgtcacataactgctgcccggccacatgcatgattcgccgctcggcgtgggagcgttgcggtggctacgacgagtcgatgcgcagtggctttgaggattgggatttcttcttgtcgttgctggagagtgggctggctgcgaaagcggaagatggtatcgacggtattggggatgccggcggtatcgatgataccgatggtgtcgaggatgctggtagtgcaggcggtgctgtggatattggcggtactaaggataccgggaacattgaggctgtcagggatgccggtaacaccaagaatcccaaggagggcgcggctcacatcggcattgttcccgagcccctaatcgaataccgcacggccccggcctcctcaaacgtgaccagcatgaccaagcgcctcgatctcatgcgcttcctgatcgccaagcatcgcgatctctacgccgcgcacatcgccgacgccatcctcggcgttgaagccatctccatgagccgcttaaccatgtgggaatcgttgatgcgcggcgacaccaccgccagccaagccttcatgacccaccccacctatggcgacggtggaatggctgccgccgtacgcttgcggagttgagaggcatcagctgaccaaatgccgatagagctccggatcgattggccgggccaaccgcaggatcgacagcgtgaccttcacgctgccttgtccgcttgcgtcaggtttggtggtgagctgagggttgtcaaacgcggcaacgtggccaacgtagtagtacttaccctcggcctcttccgccttgcgcataacgaataacgggacgaaatgcgtctggccccaattcgggccaatgccgttaagcgcccatcggaattcgggagactgcggagttcgtccattcttgctgaagtatttcatttcctgtgtgctcaggaattcatcttcgtattgacttgccgcgtatttcacgaagatgggcatggtattggtttccttgtcgaggaggtaaccacccacgttttgcggagtattctccttcttccatccgcacagtcgcatgacgtctgccatggaatatttgcgttcgtacaagaacatgtgatcaaagacctgttgcctgtcggcggcctcgcggaatatatctcggcaattggccataccggtgcgcagagtgtccgcaaagaagatacggaacgttctgttcgtggcaagcatatcggcgaatctgctgttcaatcgatatgcggtaccgttttctgtgccggcgctgttcacggcttcgactaatggctgattgccgaaacgattgcagtttgggccggtgaaatatgagtaatcgagcacgctgatcgcagagtcgaattgcgtgtctgaaccatcggactgcgggaattcagtacgaatcgcatcgagcaattcgctgcggccgattggcgagcccgcactccaatgctgcggtacgtcgtcgtcgagccgttcgctgacgaaatggcatagctgagcaagaatgaccaattcgtgcggtcgcaatccgggcagcagcagctccgctgccatcttgagtatcgcgtcttcaacgtcggtcaccggctccaactgatcctcaaatgtcgcttcatgatgtttgcctttgcccaggcttttttcacgggaacgcacgaaatcaagatagttgctgcgcttcgatgcgatggtatacggcagtgaggggtcgtagttgtagatgtccgtaagcatggggatgcggcccagctcgtaacggacttggcgatactgttcggacagctttttcatgtcggaccagtcggcggtgtccaaagacttaaggatgcgctccttggcgatcgggtcgaaactgatggacgacaggccgattgactttctctgcaggttcttgcgagctctgtcgcggtcgccggtgttgccgtataacgccaccggaatcagatagttgttgttgtaattgccaatgaaatcgataaccacaacgctttctttgtgcgggaatttgcgcagtccgcgcccgagctgctgcgtgaagataatgctggattcggtgctgcgcaacatgacgatttggttgacggcgggaatatcaactccctcattgaacatatcgacagtgaagagatagtcgagttcgccttcaatgagcttgcggacgtattcgtctcgctgcgtttgggacacgggcctgccgtcatcgtccgtgctggtaacggcagcggtgcgataggggcgttcagcttgttgattccactgttggttaaacagctgggatagcttatgggcttcctcctgtcggctgcagaacacgagtccggtgaccggaatgttgaactgcccatattcctgcaacttgtcaatgatgtagcggactcgcttttcggtggcaagctgctcgatctcgtacttgagctgtttcgagtccttctcatcaaggcccttggagacatcgagacgatgggcgattccattcggatcgtcgttggagccaaggtattccgcaacaccgtagtagtggaatggacagagcatgttctcgtccaacgccttttgcaagcgaatttcgtacgcgatgttatgcccgaatagctcgaagatgttgatgccgtcggtgcgctctggcgtggcggtcatgccgagcatgaagtcggcatctttgaaatgattgatgacgcgctgatatccttcggctccagcgtgatgaacttcgtcaaccagaacgtagtcgaattcatcggatttgaattgcgccaaaacctccggctgccgcatcgtctgtaccgtggcgaatacgtagcggcggtcctgttgcttgctggtgcctgaatacaatcccaattcggattcatcgcagccgagcaccttttggtaagacttcattgcagtttgaagaatcatctgctgctgggcgatgtacagcatgcgcttcggctggcattcgcgtacgtcgaatgcggaaaggtacgtctttccggtgccggtggccgacacgataattgcgcggtgctcgccttgttcacgaatcttcttgagattcgccaacgcctcctgttgcatggcgtttggctgaatatcatgcccctcaagcgactgcagaatctcatgacgcggtggggcgtatttcttgaaatcttcctcatactgtttgatccactcttcggtcagcggaacggaaccagccacctgtgagtcgatttcatcctggaactgcccgaccagctctccatccgccagcgatgagactttgagattccattcgcgttgcgtggtcaatgcggctccagtgagattggaactgccaacgtacaggtcgtaatagggtgtaccgtctttcatgcggcgagaaaagatatatcccttgggatggaatggttgtccttgagccattgcggaaactgaggtattacgggaaccttcccacacgcgaacgtcaacaccagtggtgttctgaagatgcagcagctcccagaatgccctgggatcgttgaaatgatttttcgttgaggtaatcagtgtgcccgctcgggtcgctgtttcatggtgacttctgaagtcttcaaataagctgagcacggcctcagccgagacgaatgcgacagaaatgtcgaaggaatcgctagtagccaaggaattgccgatttcctcgcgcatggtcaatccaccggggcgatttgcgatgagggtcggcttatattcgccgggagcatctgagcgcggctcgatcagacctgagatgacatcttcgaggatcgagggggttggatcagaatcgtgatgttgcgtgttggctggagagtctgaggtgctgaccagatttatagacatgttgccctgttcccttgcgattcggatcgtttgatgactgcctgactgcgctgtggcgcgttcatcggagcgtcagttgtttgttcgcgataatcgcgactgcttcgcgatctaccggagcccagttcaatgtcggcatatcagcaggattcagccatcggatatcggtgtgctcggtgagatgcggcgtaccggcgatgaggtgacagatgaatgtggtgagccgcacggttccaaagtcgtaggcgtattcgctggtacatacctcttccgcgacctcaacttcgcataacagctcttcttcgatttcgcggtgcaaggcttgccgcgctgtttcatgaggctcaattttgccgccggggaactcccagtatccggccaacgactttcccgggccacgctgggcgcatagtacggtgccgttggtgacgattgcagctcccacgacgttaatgattttgcgttcccgctccatgaacaaccaggatacaacgctccaagatccacaagcgatccacgatcctcggcggttttgcaatatcgatcctgatgcttttgattatgcgatcggacgggtcgaaaatgtcggtgtggacgctgccgactattgtggtgagcaggagaagcagtctgtttccgaggtgagattcgggaacggtccgactctcggcagtgatttatccacgcagacaagccaaaggagcctcgccatgatcctcgtcaccaccaccccgtctgtcgacggatacaccatcaccaactaccagggcatcgtcttcggcgaagtggtgtccggtgtgaacatgttcaaggatcttggcgcgggcctgcgcaacatgttcggcggccgcagccagggctatgaggaagagctgatgcgcgcccgtaacgaggccatcgccgaaatgcaacaacgcgcggaggcgatgggtgcgcacgccgtggtcggcgtggacatcgactacgaggtgctcggcgccgacaacggcatgctcatggttaccgtgtccggcacggctgtgcagctcgcgcgcaaggcctgaaaatacctatattgagggcggtcgggtggcctgcttggctgcccacgcagttcgtgcagcttacagcgcgcaaacgatcagataaatcgccacgacgtggcaggtgtatccgatgaccgtgcctaggtgaaacacctcgtggaactcgaaccagccggggacggggttcggcttgcgcagcgcaaaacacacggcgccggcgatatacgcggcgcctccgcatgcgatgagtatggtcgcagccgggcccactgcgggagccgtccagagttgcggaatgagcgtcaccggggccaatcccagcacaacatacacagtggtgaacacccagttcggggtgcgcagccagacgatatgcagtatcgtgccgatggccgcggtcacccagatcaccgtgagatatggccggcgaatcgccgggctgagcgcgaacaacacgggcgtattggtgccggcgatgatgaggaagatgttcgaataatcgatgccgcacagtacgcgagtcaccttcgcgctgcgccacggcacgacgtgtagcagcgcgctgttgccgaacggcagcatggccgatgcgccgtacaccgcgcacgccgctttgacgggaccggccggcgcgatacaaatgagcacgatggacgccgcgatgcacagcggcagggtggcgaggtgcagccatccgcgaaggcggggcttgcgtatgccgaatgcgtccacgggaacaatctgacgcttgaccgctttcagcgcggctttggcctgacggtaacgtgattgcgcggccttgtagcgggccgatgcgcgatccagtgcggcggggccggtgcttgcaccggacttttggctcgcggtcacggaaggcgtaactgttgaggcggaagccatttttcgcccagatggcgtactgatggaaacgctcatacgaatcacctcgccatggccggcgacgctctcccgaccactaacttacgctaccgtaacctagtataggtcgacacaataatcaaggttgattcgtccgacagataaatggacaaaaatcctatgaacccagcaaagcggtcctcggtcccggacaaagcaaaagagccggaacctttcggttccagccctttacttgctggtgcgagtggggggagttgaacccccacgagcatacactcactgccacctgaagacagcgcgtctaccattccgccacactcgcagacagtcgaccaacttacacccagccgtccaatcgcacaacgtccggcgtgtcgcgttggtggcagacatgcattgttcgtgaatctcctacgggtgctgtgattttttgagtgtagcgctgctcccctcagtcacttcgtggcagctcccctcagagagggaagccagaaggagattgcgcaagctacggctaggctcacaggcctggtttgcgctcgccgttgccgtagaagtgtgccagagcctcgtcgcggaactcgtcgaagtagccgccgttgatcgaggcgcggatgtcgtccagcagtttcacgaagaaatgctcgttatgaatcgtggccagtgtgaatccgttgaactcgcgggcgcgcagcaggtggtcgacgtacgcgcgcgaataatgctggcacgtgtagcagtcgcacccttcctccagcggcccgaaatcgaacttgtgctgggcgcgcttgatgttgtaccggccggcgcgcgtgtagatcgcgccgttgcgggcgcagcgcgcgggggccacgcagtcgaaggtgtcgccgccgttctccacgcacgcgaagatatcgtccacggaggcgatgcccagcacatggcgcggccggctctccggcatcgcgtcgcagatccaggcgcaagtgtcgccgatgatgcgtttctcgatcgcgccgccaatgcccacgccgtcgaagtccagcgacgcgatctgcgaagccgcgcgccggcgcagatcctcataattcgcgccctgcaccacgccgtacaacgcctggtagggcttgcccagacgcgctgccgtcagccgctgatgttcctccacacaccggcgggcccagcggaacgtgcgctccaccgaatcctcctgataggaccgcgtattcatcagcgtggtcagctcgtcgaacgcgaacatgatatctgcgccaattttgtgctggatgcccatcgaaatctcggcagagaaccggtgcgcgtcaccgttcaaaggagatttgaacgtcacgccgtcctcgtccacccatgccatgcgttccttgcctttggcgatgatgtcgtccgacttcatgccggttacatccatcgccagcgtcttcttgaatccgacgcccagcgacatcacctggaatccgcccgaatcggtgaacgtcgggccgtcccaattcataaagcgcgccagcccgccggctgcgtcgagcacatcctcaccagggcgttcaaacaggtggaaggcgttggccagcaagcactgcgcgcccaactccttcatctgctcgggcagcacggacttcatcgcagcctgcgtgcccactggtacaaatgcgggcgtgcggatgtcgccgtgtggcgtatggataatgccggtgcgcccgtagcgggcgccgtcacgccccaacccgttcgctgccgaaggcagccgtgtaatcgtctcgaagtggaaagcgctgcggtcgccgggctttccagcctgcgctcccagcggatggttcaaaacatcgcttgtcatagtttcactttaggcaaaagggccagaaattgtgaagaactcggtttcgaggggctgattttgtgttttccaaacatctatctccgcttcaaggggctgatgcccaagtagacggctcacaagaatggcggaatggcgttagcacaaggcttccgacactctggttgagtcagatgaatagcccctcgaaacggaagtagacatccggaaagcaccgaatcagcccctcgaaaccgatatacccatggtgctcttcgatgattacacatagactttcaactaacgttcagaaaacctccagattaactgcctttactactgaattagcgcacgagagtggcggcgaacaagcgcccagagccaccgaacaaacgtgataggaattttagaaaaggagcagcaatggctgacgaattcaacccgcagggcgtcgaccagaccccgcagaataatgacaatcccgccccaaacggcaacgagactgagactcaggcatcagctcagaccgcagctgagggcgatgccgcaaccacttcatctcacgaggacagcaacccgacccagcagatgccttccgcgcaagacgatgccccgaccgctgccaccgagcccattccgaactacgccgcagccaagggcgagagcaccgtggtctccagcgctccagcctccactccggctgcagacacgcagtccgcaactccgctctaccgcccggccccagagttcggcgcgtatggcccgactccgacgcagcccgagcagtccgcacagaatgccgcaccgcagggtcaggccgccaacggccagcccacgcagcagttcccgtacggccaggcctctttgccgcagccgcaaggccagcgcaacccctacttcaacaacccgcagcaggggaacggcaacccgttcaatccgcagccacagcagccgcgcaacaacggcaatccgttcgccaacccgaacggtcagcagccgccacgtggcggactgttcggcttcggcacgcctggcgccggcaccccgaatggtcagggtccccagggctcgccccagcagcccggccagcccaataagcccggcgcttccaaaacggtgaacggtatcgtcaccgccgtggtggcggcactggttgccgccgccctgtgcctgggcctcggctatgcggccatcaccaacggctgggtgactgtcccgacctccagctcgctctcgaacgtcacttcaaacaagtccggctccggctctgccactgccaagactggcgaagcccccgattggcagacagttgctagcggcgtctccggctctgtggtctccattcagaccgcaatggccaacggcactgccaagggatccggtgcaatcattgatactgagggccacatcatcaccaataaccacgtgatttccggggctcagcagattcaggtgacgcttgctaacggcaacatctattccgctcagctcgtcggcaccgacaccaccaccgaccttgccgtgatcaagctcgacaacccgccgagcggtctcaaggccgtcgaattcgccgattccgacaagctcgccgtcggcgagaacgtgatggctatcggtaacccgctcggctatgacgacaccgccaccaccggcatcgtctccgccctgaaccgcccggtgaccgtgaccgatgacaacaataacgagatcgtcaccaacgccgtccagatcgacgcggccatcaaccccggtaactcgggtggcccgaccttcaacgcggccggccaggtaatcggcatcaactcctcgattgcctctaccgcaacttcctccgactccgccggctcgatcggcatcggcttcgcgattccgtctaacctcgtcaagcgcgttgccgatgagatcatcaaggatggctcggttaagcacgtcgcccttggcgtggtcatcaagtccgacacggttgaagccgacggtgtgacccgcggcggcgcgaccatcaccaagtcgagcgccactggttccgcagtcgtctccggcggcccggccgacaaggctggcctgaaggaaggcgacaccatcgtggccttcaacggtaacgcggtcaacaacaactactcgttgctgggcttcgtgcgcgccgcagctctcggcgataaagcgacgctgaccatcgtgcgcgatggtaagaccatggacgtcgacgtcacgctcgaccaagaggaatcttccgtaaacggttcgtccagctcgaactcgaacggcaacaaccaaaataaccagaacaaccaaaataaccagaacggcaacggccggaatggttacggcaatggcaacggcaacaacgatggcggcaccggtgatggcggcggcttctccgacccgttcggtctgtggtaaagctggttcagcgcgtcacacggcgttgagcggtaaccgttgaataccgtgtcagacaggcaaaggcccgtagcagtgagcaactcctgctgcgggcctttcgtatacgcgggaagcgtttggctgggtcggccggagcggcggcagatatcttgttccgtgggcttttgtatgcacgggaatcgttctggcaggacatcagctgcaggcgcataagggctgcgagcccctcatatgcacgggaattcttggcggaatcgtaggaggggggcgattgatgccttctgactgatccgccaacgtagtttcgccgcccggcatgtcgcgttcaggccgctgatagggtaggccaagcgctgattcgggcaatgtctcgaacgatgcgcacaataattcaacacataactaaaaacgatttctttacgccgtgtatcggatggtcgcgcggagccgaaaggccctaagcaaagccgccggtgggttaacaaggcgtgaccgcagcgccgattgcgcgggccacgcttgccgcaatcgactccgtatacgagcgtaaggagcaatgatgagcggactcatcagattcttcaccaaaatcctcgacatctgccgacttgtgccgatgcttcccgttgttgttatcgccgcaatcccgctggcattgctgggcgattggcgcccatggggcaacgcaattgcgatgccggtgctgggtaatcctggtgtaggccaatggctgataatcgcgctggtggcaatcattgtgattgacacagtgcgtggtatgattgacgatttgcgccacggacaagtcggcgtcgatttgctggccgtagtggcgattctttccaccgttgccgtccgcgagtactgggcaagctgggcggtcatgctgatgattacgtccggtgaggccattgaggaatacgcgcaggccaaggccgagcacagcttaaccgctctgatgcaggccgcgcctcaaaccgcgcacgtcgtcaacctgcctggcgtggggcgtggggctgccgccgataaggacgattcgtccgatggcttccggcgtgtaggctcggttccggcgacgtcctcccctcagtcgacttcgccgacagctcccctcggagaggggaaccaagtcccgccgtcgaggggagctggctcgcggagcgagactgaggggagctggtcggctgaggccgccacgcgccgcttcgacactgtgccggtcgagcaggtgaagctgggcgatgtgcttatggtgttgccgggcgaaaccgtgccggttgatggcgaactgctttccggctcggccacgctcgacctgagcaacatcaacggcgagccggtgccgcgcgaggtgttcgccggtgcccgagtgatgtctggcgcagtgaacggttccactgccttgaccatgcgcgccacccaggtggccgccgattcccagtaccagcgcatcctcgaactcgtcgcttccgcacaggagtcccgtccggccgtggtgaaaaccgctgatcgcctggctgtgccgttcaccgtgttgtctttggcgatcgccggcattgcgtgggctgtctccggcgtgccgacgcgattcgcccaggtgttggtactggccacgccctgcccgctgcttatcgctgcgcctgtggcgtacatcgccggtactggtcgacttgccgccgccggtgtgcttatcaaggcacaggatgtgctcgaaaacctcggccgcgtcactcaggtattcttcgacaaaaccggcacgctcaccgtcaagcagccgcaagtggtgcgcgttgagatgctgcccggggctaaaacccgtcttaatgaggatcatgtgctgatgatggccggcgttgtggaaagctattccgtgcacatcctgtcgaagggcatcgccaaggccggtgccgacgcgatggcccgtctacgtcagcggttcgcggacggccagcgtcgctgtcccgagcctgaggcgagttggcccggccatggccgtgaatatccggttgtcaaggacattaatgaggattccggcaagggcgtgtccggcaaggtgaacggccatgccgtccgcgtcgggcgactgtcgttcgctgcggccggcgatggcggcttcttgactgccgaggtagcgggtgtaagccgggcggatggcccacggcaggaggcggccgacctcctcagcccgcttcacggacagtcccctctgggtggggatactgaggccggatctggccgcacgattgccgggaacactaaggaaaaggaaacgctgcgtacgcgattcggtatgctacagccggacgaaatggcctcctacgtgtccgttgacgggcaactgatcgcccgcatcgtgctgcgagatgtacctcgcgccaacaccaaaaccgcgctcgccaatctgcacgaactgggtgttaccaagctcgccatgcttaccggcgataagcacgcctcggccgaaatcatcgcggacgaagtcggcatcgacgaggtccacgccgagctgttccccgaagacaaggttgccgccgtcaaggccgccacggaggcaagcgccgcgccggccgggcgtgcgaatcacgccgccagccctgtgtccgatgccgcagatggcatccggtccgatggttctcaaccgtcgcgttctcgatgcagccgcgccgccgcaatccgcaagccggtcacaatgatggtcggcgacggcgtgaacgatgccccggtacttgccgtcgccgatatcggcgtggccatgaccgacggcacttccactgctgcttccgaaagcgcccaagtggtcattatgaatgacgatattgcctctgtgccgcgcgctatcgccattgcacgccgtaccaagcgcgtgatgctgcaggctgtgatcgctggtctcgtacttgccaccatcggcatgattgccgccgccttcaacctcattccagtggtcgtcggcgctttcctccaagaggccatcgacgtggtcagcatcctctgggccctcactgccctcatcgaccgcgactaggcggggtatctcctcgactgagtcgcggttttgccccgctgacggtctgtaagtggggcgattctgtgggctaataggggttttgctccactcgtggtctgcgagtggggtgattttacggtctaatagtggttttgctgcgctggtgggtgttcagcggggtgctttggctggttagtcgcggttttgctgcgctggtgggtgttcagcggggtgccttggctggttagtcgcggttttaccccgctggtgggctgtaagcggagcaatttctcgggttactcgcgattttgctccgctggcggtctgtgagtggggcaatttcttgatcgactcgtggttttgccccgctggcgtgaggctggcagagggtattaggcacaggattcccaccactcgcccctgttgcaacggaaggctttgcgataacctgtaacgcgtgactgaatctgagaacactgaacttcgtattgctgtaattggcgctggtccggccggcgtctactcatccgatatcttcctgcgccagctcaagaaactcggcgaggaactcggcctcggcaccaaggcccgcatcgacctgttcgaaaagctgccggtaccgttcggtctggtgcgttacggcgtggcccccgaccacccgtccatcaagttcatcgcctccgcactcgagaagacgcttgataacccggacatccacctctactgcgacgtggaattcggcaaagacgtgacccttgatgatttgcttgcccgctacgatgccgtgctgttcgccaccggcgcagtcaaggacaagccgctgaacctgcccggggccgacctcgatggcgtatacggcgcggccaagttcgtcgaatggtatgacggctaccccaccggcgcccgcgaatggccgcttacggccgagaacgtcgctgtgatcggtggcggcaacgtggccatggatgtggctcgcgagctcatgcgcaacgccgacgacctcaaggccaagaccgatatcccggacaatgtctacgagggcatcgacaacaacaaggcgaaaaccctccacctgttcatccgtcgcggtgtggcccaggccaagttcagcgtgcaggagctgcgcgagatggagaagctgcccggcgtgcagctcatcatcaatgaggacgacttcgatttggacgacgagaccatcgaggtggccggcaaggacaagctcacccgccagatggtcgaggagctgttcgccatccgcgagatggccgaggacatggaagatgacggcgacgtcgacttcgaaggcaatccggccgaccgcaagtactacgtgcacttcaactccgcacccacggaaatcctcggcgaggacggcaaggtcaaggccatccgcgtggagcgcaccgaaaccggtgccgacggcaagatgagccgcaccggcgagttcaccgactacccggttgaggccgtctaccacgccatcggctacaagccggccgaggctcccggcattacttacgacgagcacggcgctcacctggccaacgccaatggcgatggccgcatcaccaccgaagcagacggcggcgaagtgcgcgagcgtctatacgccactggctgggccaagcgcggcccggtgggcctgatcggctccaccaagtccgacgcacttgccatcgtgaccaacatgcttgaggatctggccaaggccgccgaaggtggtcgcgtggccgaggatcgcgaccccgaatccatcgaccgactgctggaaagccgcggcgtcaagccgattgacttcgctggctggaagaaggtcgacgccttcgagcgcgccgaaggcgccaaggaaggccgcgagcacaagaaggtcatcgagcccgaccagatgcgtgagctcgctctggcctgattgactatcagctcatcgcaccggcaactgcaccagcgctggcaatcggcgcgattgatacatcgataaataagaacgccggttatacgccagcgttcttatttatataaaagccagtgtcatgccagtcgagcaggccgatgggccaaacgatccaagcagccaaagcaggccaaacaagcaaagcgtcccgatcagaccaataaacggtaaagcggtaaaacaggccaagcaaccgcactgtcaagcatcgtcaatcccatgtaaacaggctattccgatccccgccaaccgcaccgtcaggcaccgccaacccccatccgattcacccctcggcgcacatccagccaatattcaggcagtgattttagtgtgagcctcatggatgccaaagtacgggtgcacggccatttcaacggcctgaagactacgctgctgttcgccctgatgtgggccgtcatcatgctgatatggtgggccacgggcggcagccgccaaacgctgagcatctacgtcgtcattggactcgtcaccacattcggctcatactggttctccgacaaactcgccatcgcatccatgggcgcccgcgaggtcagcgaacaagaagcccccgaaatctaccagattgtgcgcgaactcagcgccaaggccggcaaaccgatgcctcgcatctacatcgcgcccaccatgagtcccaacgcctttgccactggtcgcaacgaacgtcatgcggccgtatgctgcacccaaggcatcctgcagattctcaatgctcgcgagctgcgcggtgtgctgggccacgagctgatgcacgtgtataaccacgatatcctgacttccgccatcgcctccgccatggccaccgtcatcacgtacctcggctattccctgatgtatttcggcggcggcaactcgcgcgacgaccgcgataattcaggcggtctcggcttgattggcgtgctcctcagcgtgattctcgcgccgattgccgcatccctgattcagatggccatctcccgcacccgtgaatacgacgccgacgaagacggcagtctgctgaccggcgaccccgaggccctggcctccgcgctcaacaagatctcctatggtgcccagaccacgcccatgcgcaaaacggccggcacccagtccgtctccgcgatgatgattgccaatccgttctccgcggtcggtttctccaaactgttctccacgcatccgccgactgatcagcgcatcgcacgcctgatgcaaatggccaatgaaatgaacggcactccggtggccgcatccacgtattccacgcgcgcaattcactagtccagcacagaactcaaaccggcacatggcgcaaggtgccgcataggtgatacacttgcctctcgtgcgtggaagcgcacatgcggacgtagttcatcggtagaatgaaagcttcccaagctttagaggcgggttcgactcccgtcgtccgctccatcgattttccttgaaatttcaacggttttccctcttttgagagcttattttcctgccgtatgaccgctatatgagaacaattcacgtcgtccgcgtatcgtgatgggcgatgtgtgaacccaagaccgctgcaaccaatggccaaccaacgccaaccctcgaacgcaccccgcacgacatcttcgtcggtgccggactggcgctcgccggaggcgtcttctggggcgtcaacgccaccgtctccaaactcctgatgaacgactatcacgccgatccgctgtggatcgcctgcgtgcgcgagctattggccggtgtcatctttctggtttgcgcaggaatcttcacgcctgacaagttcatcaactcgcttaaggactaccgttcctacccgagacttctgctgtgcgcgttcttctgcgtgctcatggtgcaggtctcctacttgaaggccattgactggaccaattccggcacggccacagtgctgcagacgctcaatctgctggttgtactcgtattcgtatgtattatgggcaaacggctgcccgacaaacgcgaaagcatcggtgtggtactcgcttttgtgggcacggtgctcatcgccacaggcggcgatctcagccagctcagtctgccgctgcccggtctgctgtggggcctgaccgatgccgtatgcacgtcgttgcttgcgattctgcccatcgcattaatggccaaatggggcaacttcatggccaacggcgtcatgttcatcgtttccggcctaatgctgctgccgctcgtgcgcccgtgggccaccgcccccgcgttggactggttcggcattggcctgatggcgttcaccgtggtgtttggcacattcggtgcctattggctattcctcggcggcacccagcgctgcggtgcaatgcgcgccaccatgctcggcaccagtgaacccgtaaccgccactatcaccggtgtcctattcgccggcgcggtctttaccccgaccgatttggtcggcttcgccatgattaccatcatggtgttcctcgtgagatagttcacagctcgcctggccccagaacctagtctggcgggcacaccccgagcgataatgaagccatgacaatcgcaacaccggaacgttatgccgaaatgctagacgccgcacgacgcggcggctacgcttaccctgccatcaacgtgaccagctcgcagacgctgaacgccgcgctgaaggggttcgcggatgccgaatccgacggcatcatccaggtgtccgtcggcgcagccgcatacctttccggcatcggcgtcaacgaccgtgtcaccggatcgctggccttggccgcttttgcacacgaggtcgccgcgaagtacccgaacatcaccatcgccctgcacaccgatcactgcgccaagcagtatctggacgaatgggtgcgaccgctgctcgcccatgaggccgatcaggtggcgcacggccaggagcccacattccagtcgcatatgtgggacggctccaccgtgccgctcaaggaaaatctggacatcgccgaggagctgctcgccaagtcgcaggccgcgcacacggtgctggagatcgagatcggcgcggtcggcggcgaggaagacggctattccgccaaaatcgacgaacgcctctattccacgccggccgatggccttgaagtggcccgtcgccttggtttgggcgagcgtggccgatacatggccgccttcacgttcggcaatgtgcacggctcctacaagcccggcgtggtcaagctgcgtcccgctctgctcggtgatattcagtcccgtgtggcgcgcgcggtggtcgagggcgagctgcccagcgccgccggcatggtcgacttccccaacggcaagccgttcgagctggtgttccacggcggctccggttcccgcccggaggagatcgccgaagccgtgagccatggcgtgatcaagatgaacatcgacaccgacacgcaatactcgttcacgcgcccgattgccgaccatgtattcgagaactatgacaaggtcctcaagatcgacggtgaagtgggcgaaaagaagttctatgatccgcgttcctggggccgcaaggccgaggaatccatgtccgcccgcgtggttgaggcatgcaagcaactcggctcggccggcaaagcactcagataacacccaaataaactgtcattcgccgtggcagcgccttggtgtcggcccgcctcgcgcaacgcgcggcaaagacaccagaagcccgattgcgtgagatggccgcgccccgagtagagggtgtaaggtagtctgtttccggcggaatcgtgcgaatgcggaggtgcatcatgcctggaattgttcttatcggtgcccagtggggtgacgagggtaaaggcaaggcgaccgatctgatcggcaccaaggtcgattatgtcgcacgcttcaacggcggcaacaacgcgggccatagcgtggtggtcggcgacgagtcgtacgccctgcacctgctgccctccggcatcatcaacccgaacctgaccccggtgatcggcaacggcgtggtcgtggatccggaggtgctcttcgaggagatcgacggcctggaatcccgcggcatcgactgctcccacctgctggtgagcgaggccgcgcacatcatcgcgccctaccaccgcacgctcgacaaggtgaccgaacgcttcctcggcaagcacaagatcggcaccaccggccgcggcatcggcccggcctacgccgacaagatcaaccgtatcggcatccgcgtgcatgacctgttcaacgccgaccatctgcacgacaaggtggaggccagcctgcaccagaagaaccagatgctggtcaagctctacaaccgtcgtccgatcgacgtggaccagaccaccgaggagctgctgaagctcggcgaacgcctcaagccgtacgtggccaacaccggcctgattctcaacaaggcgcttgacgaaggcaagaccgtactgtttgaaggcgctcaggccaccatgcttgacgtggaccacggcacctacccgttcgtcacctcttccaacccgaccgctggcggcgcctgcaccggcaccggcgtgggccccaccaagatcacccgcgtaatcggcatctccaaggcctacgtcacccgcgtgggcgaaggcccattccccaccgaactgctggacgagtccggcgaatggctgcgtcagcagggccacgaattcggcgtgaccaccggccgcccgcgtcgctgtggttggttcgatgcagtcgtcaaccggtacgcctcccaggtcaacggcctgaccgacatcgtgctcaccaagctcgacgtgctcaccggcctgaaggagattccgatctgcgtggcttacgacgtggacggcgaacgtcacgacgatatgccgaccgatcaggccgaattcgcggcggcgaaaccaatctacgaatccatgccgggttgggacgaggatatttcccaaatccacgacttcaatgatctgccgaagacctgtcaggattacgtcaagcgtcttgaggatctgtccggctgccgtatctccgtgatcggcaccggcccacagcgcgatcatgtcatccagatcaattcgctggtcgactgaccgtctgcaacgaatttcccggcttgactggtaacgacgcggcacatgatatccgccggctgattccgcgattcgaccacttgaagtggaagatggcggcggccggcatagtcattggtctggtttcaggattgctggttgtcgtataccgtctcggcatcgaatacggcacggatgcgtcccgttggatatatgcgcggattcgcgagaccccgtggctgattgcgccgtgggcggttgccgcggtggcggccgcgctagcgatcgcgtggatggtcggcaaggagccgatggctggtggcagcggcatcccgcagaccaacggcgtggtgatatgcggcttgaagatgcgttggcagacgattctgccagtccgtttcgtcggtggactgttgggcgcgttgtttggtctgtcactcggccgtgaggggccgtccattcagattggtgcgtcgggcgcgcagtgtgtatcccaccgtttgcgcggccgccgccgtgaggacatgcaggagcattatctggtcaccgccggtgccgcggccggcttgtccgccgcgttcagcgcgccgctgtccggcatgatgttcgctttggaaggggtgcatcggagtttttcccctgcgattctgatgggcgccaccgccgcatcgctgaccgccgatttcgtctcaaaatactgtttcggtctgcgtccggttttggatttcggtgatatcggtcagctgtcgttggaagagtatgtgtggctgattccgttgggattggtggccggtttggttggttcgctgatgaaccgctcgttgcttggcttccagacgctgtacggcaaactgccggcatggagccgcccgatgattgcgattgcgatcgcgttgcctgtcggcatctggttgcccgatgtgctcggcggcggctcgaatctgattgatgccgccgaacatgcgcgcgtcggcttgggaatgctgtgtctgctgttcgtggcgaagatgctgttcacatctacgagtttcggctcaggcgcgcctggcggtattttcatgccgattcttgcggtcggttcgttggccggcggcatctgcggtgaagtgttgcatcgattcggtgatctgccatccgacgcagtggcggtgtttgcggtgtgcgtgatgacgggcacgctcgccgcgtccgtgaaaacgccgatcacgtcgattctgttggctgtggagatgtctggaacgttgacgcacatgctgccggtcgcggccgtcgctttcatcgcgctgttggtgtccgatttgctgcgcaccaaaccgatttatggggagttgctggagcggtacgtgcgcgcgcaaggcatgcagatggcgatcgcaagccatgtgggcagcggcattatggaactgccattggaaatgggagcgattgcggacggcaagcgggtgcgtgacgtgcgttggccgtctgggtgcctgatcatcggcctgcgtcgcggcgaaagcgagatcgtgccgcgcggcgatacacggctgcgtgccggcgactatctggtggtgctgttcagtggcgaggaggagcgcgaggtgcgacctgcgatgcggcggctgtgtgatgcccggcttgactgagcctggctgaattcggctggactctggatgtccgaatctgcggaatcggacatccagggtgcatacgttggcgctccgtgtaaactcatatgcgttaggaaggcagcaatcgcggcccagctcgttgttgcacggcctatgggcgggaacaacgctgtccgcggaaggccagtacagggggagcgcaatggaatcgcaagaacaatcgtcgggagacgtggtgactgcgggtgaggactcgcatcctatcacgcaggcaatcgacgctgttgaggtgacgcatgctgatgcaaccgcgcccgccgctaacaccatggatccgcctacgattcccctggcaccgatgaaacgtatgcaggcgcggttcaatccgctcgccgacggactgatgtatgttgtggtgttcgtcggtggatttgttggagtcggctgtcggcatgcgttggatatgcttctgccgtcggttagcgggacgccgttcgttgtgggcacgtttgtgtcgaatatggtcgcctgcttcctgttcgcgatgctgaccgaattcatggcgaccgcttcgtggctgcgtcgccgggtgcggcaggttgtcagccgtggtgttgggctcggcttgctcggtgggctttcgacgatgtccggcgtgatgctggaaacgatggaaggtctgcacaagcggcatatcgccagtgcgcttggctatcttgcgggaaattttgcaggtggtttgctcactgccgccgccggcgtggttctgatgcaggcactgctgtcacggagtactcgaaagcgggttcggggtgcgttttcagctgtttccgtgtccgattctgccgaatcggacacgcagggcgtacgccatgtgaaagtgaccgacgtggcgcgttctgccgcgcaggccgcaatggaagccgcgcaggcggcccagcagattgcacagacgggacaggttccgcgagtcgaaacaccaaccgtgccgccgccagccagccagcctatgcagacaggccacgttccgcagattcctccgctggccgttcctcagctgacacagccatcgcatccgttgctgcgcgagccggatactccagacttggggcagctgcccgagattaagcagtcgcagccaatccagcagccggccaacccgcttccacccagcttcgagcccaaaccgatcactgcggagatttcgcttgtcgccgacccgactaccggggaggtgcgctgatgatgtggatgatctgtctgttcggcggtctgggagccatggcccgttacgtgctcgacgtgtcaattcaacaaggctggaaccgcgagaatcgaagaacgaaccgcaacttcccgctatccacgctcgtcatcaacggcgtcgcctcgctatgcgcgggcatcgccatgatgtcctactattcgcaatcggtggatatggacacggtcatgatgttcgttgtcggatttctcggtggtttctcaacattctccacggcgctcaacgaagtggtttcattgattcgacagcgtcgttttacgctggctctgggctatggaatagcaaccgtcgcggtgcctctcatttgcgtggccaccggtttcggcattgcgctgcttgccaatccggcgtaattttcacgttacacggacggtcgctgagtaacgtgaaagaaatctgagcgcaaccgccatcaaggccgccagtccggatgcaacgctggtgattgcattcgaccagaccaagccgctgctgaagaccctcgcctccgcgggagtcgacactaagaagctgtatttcgttgacggcaacacttccgactattcgagtgagcttgacgccggcctgttggaaggttcgaagggcaccattcctggcgtcaacccgtctgacgatttcatcaagcgtctcgaatccaccggtgtggatctgaaaaacaccaccacgtatggtgctgaaacctacgatggcattattctggcggctctcgctgcgcagaagggcggcagtgcgcggcgccttcaggccaatattccatcgatgcggtatcgaatgcagcgcaaaagtggcccatgaatgtgatttcaagggggtatcatgaaaatcacatgatggaaataaagttaggggtgcccccgtcaagcgatatacacaccggactgtcgaacaggttcgagagaatgtaaatgaatgtaatatttcgtggtaagcacgtgaacatacaacgatagaacagtgatgacggggaagatgcgatcatggtcggcatgcgcgatgtggcgaagaaggccggggtgtctctgagcaccgtctcgctggtggtgaacggcaacgggtacgtgtctgatgacatgcgcgaacgtgtgcgcaaagccatgcaactgctcaattatgtgccgaacgagcttgcccgcaatctgtatcatgatcgtacgaatctggtcggcgtcatcgtgcccaccatccgccacccgttctttgcaacgtttaccgcacgcagcatgcgctcgctgcgcaaggattacgcactatgctgtgctctaccgcagatgagacggatggcgaaatccagtatgtcgacatgttgcgtcggcacatgatggacggcatcgtcatgtgtgcgcacacttcgcatcccggcgattattggacgtcgattcatcgcccgatcgtcgcgttcgaccgtgtgcttggagacggtatttcgtcaatcggatccgaccacgagcagggtgggcgattgattgcgcagatgctgattcgcaatggtgccaaacatgtggtgatgattggcggtccgcgagatcaattcttcgatttggctgcgcgcggagaagtcgaggaaggaccgttcgatttgggaaagaccacgttcccgacggtgcgctactacctcacgttggaacaggaattgacctccgcaggcgtgaaatacgagtatgttgaagctggcgaagtgatggattttgccggctatcatcgtgcggtcagcaatgcgctcgacaaggtgacggccgacggcgtcgatgccgtggtcagttccgatattggcgcgtcgttctgtgtgcgcgaagcgttgagccgcggaatttccattcctgacgagctgcagatcgttgcctacgatggcacgtatttaaccgatttggccggcatgaagctgaccgcggtcgcgcaggatttctcggcgatcgcacagtcggcagccgaccatattgtgcaggctattgccaatgaggaagtggctgcggctaacgcttcacgcaagaatattcccaagccgttcgagccgaacgtgcttattcccatgacgctggtgccaggcgataccacgcgttgatgctgcgcgtcttcatgcgtgtgcccggtgtggatcgcatcgatttcagcggcgtccacaaccggcgaacgcccgtcgatagtcgtgctcatcatccgacttgtgcacatgtgtccgattctgccgaatcggacgtctaagttccgaaagaagtgttctgtgtgtctgattctggagaatcggtcatgtgtgatgcgtgagatgtttggatgtccgattttgcagaaacggacacattggggtcggacaggctgggttgtgtagaacaccgcatcaaaccggttcgacacgcgcattttgcggtattactggacatcaacgtccctttcgaggtaatatcaaaccggttcgatacgtataagtatgtaaaagcacgcatacactgcgtacacattgcacctgcatccatgaaccaagggaggtcccatgaaaaacaaagtgcagctcatcgcttacgccgatcgtctcggcgatggcactcttagctcgatgactgacatcctgcgcacccgcttcgacggcgtgtatgacggcgtgcatatcctgccgttcttcactccgttcgatggtgcggatgcaggcttcgacccgatcgaccacaccaaagtcgacccgcgtctcggcagctgggacgacgtcgctgaactttccaagacccacggcatcatggtcgatgccatcgtcaaccacatgagctgggaatccaagcagttccaagacgtgcttgaaaaaggtgaggaatccgagtattacccgatgtttctgaccatgagctccgtcttcccgaacggcgccaccgaagaggaactggccggcatctaccgcccgcgcccgggcctgccgttcacccactacaagttcgccggcaagacccgcctggtctgggtcagcttcactccgcagcaggttgatattgacaccgattccgacaagggctgggaatacctcatgtccatcttcgatcagatggccgcatcccacgtcagctacatccgtctcgacgccgtgggctacggcgccaaggaggccggcaccagctgcttcatgacccccaagacctttaagctcatctcacgcctacgcgaggaaggcgtcaagcgaggcctcgaaattctcattgaggtgcatagctactacaagaagcaggttgaaatcgcctccaaggtggaccgcgtctacgacttcgccctgcctccgctgctgctgcactcgctgttcaccggtcatgtcagccccgtggtccactggaccgaaatccgcccgaacaacgccgtcaccgtgctcgatacgcacgacggcatcggcgtgatcgacatcggctccgatcagctcgaccgcagcctcaagggcctcgtgcccgacgaggacgtcgataatctggtcaacaccatccacgccaacacccacggcgaatcccaggccgccaccggtgccgccgccagcaacctcgacctctatcaggtcaacagcacgtactactccgcgctcggctgcaacgaccagcactatctggccgcccgcgcggtccagttcttcctgcccggagtgccgcaggtctactacgtgggcgcgctcgccggccgcaacgacatggaactgctgcgcaagaccaacaacggccgtgacatcaatcgccattattactccaccgccgaaatcgacgaaaacctcgagcgcccggtggtgaaggccctgaacgccctggccaagttccgcaacgaactgcctgcattcaatggcgagttcagctacgaagccgacggcgacacatccatcaccttccgctggatcgctgccgacggcaagaccaaggccgccctcatcttcgagcccggccgcggactcggcgcggataacaccactccggtcgccagcctcgcctggaccgatgccgccggtgaccacgagactgatgatctgctgagcaacccgccgattgccgatatcgactagccgttggcccataaacgccactccgctgtgcgcgctccaagtagtgcgtccggcgtaagctgggtccatggaaaacaaaccgcccgcagcgcactgaagctagtgcgctcgggcggttttgcatgtgacggggttgcgggtcatgcttagtcggagctgaccggtacctcccgccggtgatgagagcaaagaaagagcagcaacatgttggaaccgtacgtgcgcccgggtattgacgaccgcccggatctagacaaggcattgagtcccgaagacaaggatgccgtggcccgactggccatcaaagatcgtcggcgtcctcccgaggcatccgccgatcagcccgaggcccaggccgtgcgtctggcggccgccggttcgtcggctgctgccgctgccgcggccagcgtggatgcccctgcgcctgatctgtcgtctgcatatctcgatatgcgcgatccgatggtcgccgtcaatggtcagcgacccaccgctgttcagattttccgtcttaattggggctttttcgtggcttcgattctggtcggcgcgccttgggcggcgttgaacaccatcgccatgcccaacgccgtggcgcgtttgttcgactacgacaccgcttctgccatatcggtcaccatcaatccgtccaccggacgtccgctgcccgtcgccactgacttggtggtgcctctggccgtgctggtggtcgttggcgtggtggcctccatgttcgcgatgcccttggtctccgcgctgtccgaccgcacacgtattcctctgggccgccgtaccccgtggatggtggcgggtggcgtgctgtgcgcgctgatcacgctggttctggggcagaacacagggctcgtagtgctgtgtttcttctgggcgctcatgcagtttgcctatgcgatgatttccgtgccgttggccagcgccatcagcgaacgggttccggacaaattccgtccgcgcattgagcgctggcacggtatcggcgtgatgcttggccaagcgcttggtgtatgcatgggtgcgctcggtgtgatgttcgactccttcacgccgtttgcctacaccgccgtgctgtttgcggtttccggcatcctgaccgtgatcatgctgcccaaggagccttccagccaggagcagccacatcaacgattcgagtcgagccaggtgtttgaccagttgcgtccgccggcacatgcgcctgcattcacccgtgtgttcgccgctcgcgtgtgcatgatgacgggcgttgggctgaccggggtctttctgtggtatctcgtgcgcttttgggtgtatggcaaggctgtggtgttcacttccgcgccattgaccattcccgcgggcctcctcatcgccggcatggccgcggcaacgctcatcggtgctgcgctcgcgtcctgggccgctgggccgatctccgagaagatcgaggaacggaacatcgccaccactgcagtggtggcggcatcctgcctgctgtatgccatcggcgtggcggtggcatgggggctcggagtctggtccaccggcacggcacgcgaaaacggcatgctgctcttcgcgctgatctccggattcgccttcggcgtctacgatgcgttaggccttgaactggtaatgaatgccctacccgacccgcgcaacgccggtcatgatctcggcatctatgcactggccaattcggtcggactggcgctcgccgccattatcggagccgtgctggtcagcgcatttgcgagcagcttcggctactacctgctgttcccctccgccatcgtcatggtgttcctcgccggaatcatcacgctctcttccaaggcagagtaacagcgcgataaaccggttcgagtacactggtcgtcagtaatccagctagtactcacgggggagcaaaccatggtcggtatgcgcgacgtagccaaaacggcaggagtgtcgctcagcaccgtttcgctggtggtcaataacaccggctatgtctcggacgatatgcgcgccaaagtcgaggccgcgatgcgccagctcaactatattcccaacgagctggcccgcaatctgtaccgcaatcgcaccaacactatcggtgtgattatgccgactatcgcccacccgttcttcgccacgctcactgcgcatctgcagcgtgagttcgccgcgcgcgacctcaaaactctattgtgttccatcgctgatgcagacaaaggcgagggtgaatatgtcgacatgctgcagcggcacatgatggacggcatcgtcatggcggcccacaccgagcatccgggcggctactggacatccattcatcgtccgattgttgcttttgatcgcacgttgggcgagggtgttccggccgttcgatccgatcatgaacagggcggccggctgattgcccgtcagctcatcgattccggagcgcgtcatgtggtgctcgtcggtggtccgcgctcccagttcgcggaagccaccacgttccccacgattcgctatcatctcaccgttgaacggatgctggctgatgccggcattgcctgcgattacgtggaagccggcattgtggccgatatttccgcacacgaggccaccgcccgtgccatctttgagagatattccgatgtcgatgccatcgtcggatcggacctggtggcatccgtggcgttgcaggaggcgctgcgccgaggaatttcagttccccgcgatctgcagatcatcgcctacgacggcaccttcatggccgagaccgccggcatgcgcctgaccgcggtgcggcaggatttccccgccgtcgccgccgccctcgcctcccgcatggactcccaaatcgccgccgataacggaaccacgagtgccgctgcagctgagggcgggaatgcagttgcggccaatggcggccagtctacttccgaagacatcatctccgtaaccctcatccccggagagactacccggtagctgtatcgtggcttcccccctcctcccgatgagaggagctgtctcaccacgacggaagccgtgatgttctccatcgtggctccctctccgagggggggctgtcgccgtaggcgactgaagggagttcggcagaactacttggtaaccgatttgcggtgcaatcttgtcagtatttggcgggttaacttcgctggggaagcggccagcgaagccaaactgccagttactggtggttttgctccgctggtgcgttgttagcggtacttttttaccagctcttggcgggatagctccgctgaggagctgtcagcggtgcaaaacttccagttattggtagtctggcctcattgagtattagtaagcggtgtagagctgccagttactggtggttttgccccgctgaggggttgcggatggtgcggagcccccatgtactggtggttttgccccgctgaggagctgtcagtggcacgaagtttccagttactggtggttttgcgtcgttgaggggtgctgagcgacgcttttatgccaattgctggcgattttgcgccgcacagggcatacatgccgtccacaatgtgaacacttgctggattggtgagatgaccgaacctatgtttacattccagttcgggtcgaacggcccgagaagataccgaaaggaggccgcgcgatgactggattcaatgcttctgcgtttgtatccgcacgaattattagcccgtcttcgctggcggactaattcggcactgatgcttgaagccccgtcaacgaaggcagggccaatcaagctgacacaatcggcacggccctgcatgatgcggggctttttttgttgcgctcacaaggcttacggcaaaatcccgcagacggaaacggtagcgacggtactcggtaacaacagcaacagaacagcaaacctcccgcaggcgtcaatcacctgccgatgagagtgaacagagaacacacaggagttaccaatgactgcagcagtcgaagagactggcctggggcaggcggccagtaaggccactgccatggttcgcgattcggtcaagaccgtgatcgctgcatcgatggttggaaccgccatcgaattctacgatttctacgcctacggcactgccgcggcaaactacttcccgcacatcttcttctccgacaaggccaacccgaccgtcgccctgctgatgagcttgctgaccttcgccatcgccttcattgcccgcccattgggctcgctggtgttcggtcacttcggtgaccgtatgggccgcaagactacgctggtcgtcagcctcatgaccatgggtgtcggcacgttcctcatcggctgcctgcccacctatgatcaggtcggcgtcgcagcagtcgccatcctctgcctgctgcgcttcatccagggcatcggcctgggcggcgaatggtccggtgcggcactggtcgccaccgagaacgcgcctgaagacaagcgcgcgctgtacggctccttcccggagcttggcgcaccgatcggcttcttcctgtccaacggcacctacttcgtgctcgagtccttcaatgaccagagcgcgatgctggcttggggctggcgcgtgccgttcctgctgtccgccatcctcgtgattgtcggcctcgtggtccgcgttcacatggaggagaccccgatcttccgtatggcccaggagcagaagaaggtcgtcaagtccccgctgaccgaggttttccgcaagtcctggcgtcaggtgctgcaggccaccttcctcgtggccgtgacctacacgctgttctacacgctcgccacttggtcccttgcttggggcaccaaggacaccgcgaacggcggcggcagcctcggcttcaccaaccaggaatacctgctcatgctcatgatctccatctgcgtgttcgccctgttcatcgtgctgtcctgcctgtacgcggacaagctcggccgtcgtcgcgtgctgaccttctcctcctgcgcactcgtggtgttcgccgtgctgttcccgttcctgctggacggacaggtcgtcggccagcacaacttcttcgccaacatggtgttcctgtgcgtcggcttcgccctgatgggtgtcgccttcggcccgatcggcgccttcctgcctgagctgttcgacgccaacgtgcgctactccggctccggcatcggctacaacctggccgccatcgtcggcgcggccttcgtgccgaccatcgccacctggctcgcccacaactggggcgtccactccgtgggcctctacctcgctgtgatggccgtgtgctgcttggtctccgtgctcacctgcaaggagaccaaggacgttgactttactaagtaaagtcaacggctggtttcctacccctcactcagctatcgcttcgttcgggcgtcgcctacagacagcctggtgggctgttcgtaggcgaaggcgagccgagaggcgagcagacaggccgcggacggtagtccgtccataattgcggccgagctgttgcggagtgactgaggggagttcatccccataactgaatatcgccaagttcacaacgtgaaaaatctcaattccacgaagtgaacccctgcgaggcttttccggtgcaacaggactaaacctgcatatcggaaaagcccacaaggaaagccacaacagaatatcgctcagcgaaaccccgcagagcacaagaaaatttcaaccccataaataaacaaataaaaggagcgccgaaaatggcagcaactatctggtacgagaaggacgccgatctgtccgtgttcgatggcaagaaggtggccatcctgggctacggttctcagggtcatgcccacgcgctgaacctgcgtgactccggtgtcgacgtggttgtcggcctgcgtccgtcctccaagtccgtcgagttcgccaaggagcagggccttgaggtcaagccggttggcgaggccgtcgccgaggctgacgttgttatgatccttctgcctgaccagtaccaggctaaggtctacgaggaagaagttgagccgaacctgaagccgggcgctgctctggccttcgctcacggcttcaacatccactacggctacatcaagccgtctgaggatcacccggtcttcatggtcgctccgaagggcccgggccacatcgttcgtcgtgagtacgccgctggccgtggcgttccggtcgtcgtcgctgttgagcaggatccggacggcaagacctggccgctgtgcctggcttacgccaaggctctgggcgctctgcgtgcaggcgccatcaagaccaccttcactgaggagaccgagactgatctgttcggtgagcaggacgtcctcatgggcggcatcaaccacctgtgcgacctcggcttcgacgtgctgaccgaggccggctaccagccggagatcgcctacttcgaggtcttccacgagctgaagatgctggtcgacctggctaacgagggtggcctgaacaaggctcgttggtcctgctcggacaccgctcagtacggcgactacacctccaccgtcatcaccgacgagaccaagaagcgcatgcagtaccagctcaagcgcattcaggacggctccttcgccaaggagttcatggacgaccaggctgctggcgccccgaagttcaagaagctgcaggaagagttctctcacccgcaccttgagactgttggcccgaagctgcgcgccatgttctcctggaacaacgccgaggccaaggacaaggatgaggctgagtccttcaacggcaagatcgctcgtacccaggttcagtgattgccgcccctgaaggggatttaagctagcaaaccgccgttcccgcccatacgggagcggcggttttgtgttgttgcgcgcagcgaatcattctcaataacaactatgcgctgatttcttgcaggcaaacgaacaccgaatatgcaagatcgttgatatctcagcctttccccatatgtgcgattgtgcgattctgttcaaaagggtgcagagttgttatcgagaatcgttctctgcatacggctgtccatactccaatagtgacctagctcacgttgtggactccagcggggctgcgacggcgttctcggtaggattgatttcggtttgaaggacacaatcctcgcaacacaggacttatctgcacaccgtagataccccggcgcccagcggcgccacaccccactactgaaaaggagtgccaataatggcagcacaaatctggtatgagaacgacggcgatctttccgtcctcgaaggcaagaaagtcgcaatcatcggctacggctcccagggccacgcccacgcgctgaacctgcgcgattccggtgtcgacgtggtcgtcggcctgcgtccgacctccaagtcggttgatttcgccaaggagcagggtctcgaggtcaagtccgtggccgaggcttccgccgaagccgacgtgattatgattctggcccccgaccagtaccagcgcaccatctgggccaatgacatcgagcccaacatcaagccgggtgccgccgtcgccttcgctcacggcttcaacattcactacggctacatcaagccgtctgaggatcacccggtgttcatggttgccccgaagggcccgggccacatcgttcgtcgtgagtacgctgctggccgtggcgtcccggtcgtcgtggccgtcgagcaggacccgcgcggtgacggctgggccctgaccctcgcctacgccaaggccctcggtgctctgcgcgccggcgccatcaagaccaccttcaaggaagagaccgagaccgatctcttcggtgagcagaacgtgctcatgggtggcgtgaacaaactcgtcgagatgggcttcgaggtccttaccgacgccggctaccagccggagattgcctacttcgaggtctgccacgagctcaagatgctcgttgacctgatgaacgaaggtggtctgaacaaggctcgttggtcctgctcggacaccgcccagtacggcgactacaccaacaccgtcatcaacgaggattgccgcaagcgcatggaataccacctgcagcgcatccaggacggctccttcgccaaggagttcatcgatgaccaggatgccggcgccccgcacttcaaggaactgcaggagaagtactccaacgagcgtatcgagaccgtcggcccgaagctgcgcgccatgttctcctggaacaaggacggcgtcaaggatgccgacgaggccaactccttcaccggcaagatcgcccgcgcccaggttcagtgattcttccttggctcccctcgggtgaggtgcgcacggacagcgagccggcaatcgcagccttcaggctgtccgtgtttgcagtacgctggcgcgtaagcgcctgagggtggtccccagtgcataccaaaaggccgccgctccgattcattcggaacggcggcctttcgcatggtcccaccatatagtcaaacctccaccacgtagtaaaatccccacgacgtagcaaactacccaccacgtggtgacgcaaaacggctttattccgcggaatacaaaattacgctgacatcgtggtagaagattcatcgcgtggtgggatagacagttgatatacgccggctatcaaatcaatgatgtcttgctgtgttccccgtatgccgagctgctttatcggaagcgtttcatgagatatttccccaagaaaatcagcgagatcatggtaggcctcgtcgttgagagacacgcgatcctctggagcaagtagttgagccaaacggaatacatcatatttatgcttcttgagatcttttccgtctacgtgctcgccatgttgttctcgggcgttgagatccaaccatgctttcgccttgaaaggaatgagatatttctcgttaagcacgctgatgccttgtgttgattcgcggccttgctgcagtggccgatagtagctgtcgttcagcataatggctgacaggctggaaacgtcgtttgcaatatgcaatggcgtcaggaacgagttcggcacaatagggaagtcagggtgacgtgaaaatagctcgatcatagtgggatacccgtacgtactggggtgcatgaaacggtacaggtgaggctgtgcggagttcttcgtgatagaggtgtatccgccatcgcgaatgaaagaccacaatcgttgtgcaaactcgcgaagatgtccctcggcaatcagcaccatgtcaatatctttggtggctcggaagtccaggtcgttgtcggtcatgatgatgtcacaagcggtgccgccgatgattacgtaagaatcttcgtagccggcaaaggccgttctgatgagctgcaggccttgtgtcatattgtcgctcctgagaaagtattgcggatggattcttgtatggcgtcttccaaacgttcgtcggcaatctcgccaagagtcagggccgtggaaatggggtcggcaaggtagtcttcctgcgtatattgagcaagtaggcggggatcgtacctccacagctccagaatatatgcattatctggcaccttttccaaagcggggtcgataatgcatagttccttgttgtgctgcttgagccaatgacgttcaacggcatagattcgcagttttggggtggccagttgcgtcctgcgcgaaagagcaaattcgccggccggaatcagctcgtcggcaatcatctgacgattgcgattcgtgacggtatatttgctgaatattggtgacttcaggagatgccaagatgatttcagtaaatcaagtcggctggtctgccttgaagtcagtagttcgacgctattgctgcggccttgcttggtgcggtgcacgaatgccagctgttctaacagcgtcacggcaacgctgacctgagcttcggtaaactgaagcgctcgggcaatatctgattggactttgctctcgttggagtagagcaaatacagccagaccagctgtgttgcgggggagaagggtcgcacctcgatatcctgtgcgttctccagcggccgcgaggagatgcgctgggtgaacaccatgcccagtgaagggatatacagttgggtaccgggcacgatgaaaggaacgtgattctgaatcagggcttttcgctggtatgcagaaagccggggaaactgaaagacaatgggcagatccgtccgctgctcaagcctgctggcgtcggcggtgacgcgtgtgatgctgaatgggtgagcctctccgctcgcgattagcattctcgtgttgtcgatggtgagtttgctgaatgtccgtccgttggtcagaaatagcggcagtgaggcagtaccatcccaagaagtgatttggcagggcagaccaagtgtctcgcgaatgtaatgctcggcatccatgtcgacctcaatccttaacgaaaatctgtaagattcacatctcttgttaagtatatagaatattattaagtatttcggggttggcatgtcgcgaatggaaagaaagggcagtcatccccgaaatggagacagcttagccgggaaaaaggacgacgccagcatccggagaagatggatgactggcgtcgggtaagctcgcaaaagcactactgaacaacccacgcagaagtgtcggtggggagctggccttcgggggtcagcgggccggacgccagcaccacggagccattgggcagcgcgaccggagcattgccgaagttggtgattgaggtgaacgcccgcccgccaaccgccgcgcgggcgtacgccaccacatcgtcgcccatgtccacttgctcggccgtggtgtcgcgcgtggcggtcagcgactcctggcgaatcgccagtgcggcgcgatacagcgcgagcatcgagtccgggtcggcttgctccacgtccaccgcgtaatccttgaaccacagcggttgcggcaggtgcgggtcggcggccggcgtcacgccatcggcgcgcgtagccggcgagaagccgaaggaagcacccgtgccgaactggcctgcggcgcacaacggcacgtggttctcgccggtgccgtcatcggccgggatcgggcggctgaaatcagccaaggtcggttcgtttgcagcggtccacggaatcggcacgcggcagccgtctcggcccttgtccatcgtggcctgagcggtgtggaaagcggtcgggtcttccagtcgatcccacggaatatcggccacttcaaacaggcccagctcctcgccctgatagatataggcggcgccgggcaggccgagctccatcaaagcggcggcgcgggcgcggcgggtgccaagctcgcgatcctcgggatacgtggtgccgttgcgcagcagccagtcgtgcggcagctggtggtagggcgcgcccttgacctgcggcaggccgtagcgggaggggctgcgcggcacatcgtgattgttcatcacccacgtggtggtggagccgccggtttcggcggcggccttgagacccgcgtcgatggcttcgcggaactcgtcggcataccagctggcttgggcgaaatcgaagttgaacgactgacccaactcgtccatcgaggcatacaggtgctggtgctcgggcaccacccacgcctcggccacggcaaagcgcggcgggtcgtactcgttgaacaccttgcgccattcgcggtagatgtcgtgcacttcgcggcggtcgaacagcggatggctgaagtcgtggttcagcacgccgaccacgctgtattcgcggccgagctcctccagcggcttggattcaaggtctttggccagaccgtgcgccacgtcgatgcggaagccgtcggtgccgtggtcggaccagaagcgcagggttttcttgaattcctcgtggatgtccgggttcttccagttgacgtccggttgcgccttgtcgaacaggtgcagataccactggccgtcggccacgcgagcccaggccgggccgccgaagaaggactgccagtcgttgggcggcagttcgccgtgctcgccgcggccgtcgcggaagatgtagcggtcgcgcgccggggagccgggctcggcggcgagggcttccttgaagaacacgtgcttgtcggcggtgtgattgggcacgatgtccacgattaccttgatgccggcctcatgcgcggctttggccatggcgtcgaagtcgtccatggtgcccagtcgcgggtcgacgttgcggtagtcgatcacgtcgtagccgccgtccgccaaatcggaggggtagaacggggagagccagatggcgtccacgccgaggttcttcaggtagtccattttctcggtaacgccggcgatgtcgccgatgccgtcgccgttaacgtccttgaagctgcgcgggtaaatctggtaaacgacggcctgcttccaccagtcgtcattgaggttgttggcggtcatgccgattcctttctgtgcgggtgcgattgcgtggctcacgtggtgtgttgcgcccgattgctgtgggttagtggttattgggttcagcaggactcgaactgcaacggtgaacccatgcttgcttatcacgttgatgacaacggtatcatgcaaatgatttatgcgaaagtacaagcatcggcgtttcgtggtggtaacgtggtcacgctcaccttagtccacacagaaaagacattgagggcagaggtgggacgcggtgcaccgtgcccaatcacccctgcgcaggcacgggcgcggcaggaggcgcagtggtctcacgcagcacgagcggcgcgtcgggctgaatgaacgccggttcaatcggcccgcccgcaatggcctccaacgccatgcgcccagcgtcggcacccatggcaaacggatcctgatgcatggtggttagccccacggcctgagacatttcaacgtcgtcaaatcccacaatcgaaatatcctgcggcacgcgtttgccgtactggcgcaggcgatacagcaccggcagcgccagctcatcgtcctcaaaacagaatgcagtggtgccggccggggcggtcagtaccgcgttcagagccgcgctggtctccgttgcgccgcggggcacctgaaggttggtcacggtgagctccgggtgcgcggcctgcgcgtccagcacgccctgcagtcgcgattcggcgctatagcgcatattggtttcggcgggagtgccgccaacgaatgcgatgccccgatgccccagcgcgatgaggtgttcgacggccgcgcgggtggcggtacgatcatcaatgcttacgccggagtcgaacccgtccgtggaggggatgttaatgccgatgatcggcacatgcatatgcttgaggcgctccacctcggccggctcgatgttgaacgagctgacgattaccgcatctgcattgcggcgcacgggcaggtccgcaaagaaatcgtgacgctcttcggcgttgcgcatggggtaggccacggtgtcatagccagcagggcgcagcaccgagttgagccctgcaaagatgttcgcattgaaccaggtggtgatggtctcgctggccagcagtgcgatgcggaacgactggccggatttcagcgcggccgccgagcgggaaatggagtagtcgagcttctcggcggcggccattaccttgtcgcgggtttcggggagcaccaggtccggcttggcgaacgtgcgggacactgtggatacggaaacgccggcctccttggccaccgcctgaatgcttgctttggtcatatcaaatacccccgttattgttgcgccgttgtgatgatgacgcgatgttgcggcatcgtgtttgcgccgtcgatgcacatgattcatatcgtcattgctgtgacaacggtatcatgcattgatctgtcgttgaataacgccggtgaagatcctctcgtgatgaagacgatttacagtgcgataagagtctataagtggaaacgtttgcatattgctccggtcaaatgtgccgcgattgtctgtctgatgcgatttagctccgaaaagtgatctttgacattcactattgcatgggtttgcaataatgaataccttcttagcaaagagtaaacgcttcgaccctccgtgctgatttggcttgatgccaaggggcaatgctgcagtattgtgcgaaaaaatgagatatggccggcaggctttactgatgtcgacttgcaagaatgacaacctttgcagtatgatggcgaccaaacgagagaagcgatgcgtgtcagaatcagtaagtggttagtggctatttttatcgattctgcgcaggccaaaagctagcgtgtgcaaagctgatccgccaatgaaacaggcatgctccgccgaagctgcacgcctattccacgacctacaactgcacaacaaatgagtcgcggcgatacgtcataccgatgcacccaccgacggctctccggagatgaggaaagcatgatgatagcgagaagtatcgggggggggcagcgaaattcaaggctgccgccgctgccctgcttgccgctgccgtgctggtgacgtcaactggctcactcgcattttccaataacaaacttgcctatgccgccgatctgagcgacggcgcattatgcactccgaccagccagtcgatgggcactgaagcagatcccgcaactgagagggattccggcgttgccacttgggttggcggcgatatgtatgtcggtaagaagtccgacaacctgaccaatgctgacggtcctgatgcttcatattccgcagaagccgaaggcttgactgtggtcaacggcaagctcatgctgcatcctcagaagaattcgtggaacggcaagggctttcgtttcggcgttgccggcttcggtacgcagtatcgtcccgccgaaggcagcaccgcattggtagttggcggcaataccggaaccgtaatggatagtgccacttccaccgctgatgtgaaagcgtggaataagcctggttttattgatggacattcgcacgtcggctcactctccggtagccagtcggatgtatgggacagggacggcacgtcgtcgattggcagctataacggtgcttccgtcaactggcagaaggacaagtccgggaatactcagaaccaagacgccggcaatctgaccaaagtttcagtcaaggctaccgatggcgccgccgccactgacaaagatttttcgaaggatacgttctatcaagggtatgtggtcgacgatatcgttagcccgctggccaagcaaaataataccggtacagtgagttcaagcatctccacgttgtctgagcttactcgccataagtacaactattacaaggaaggcaccaacgccgctagcggcatatcttacaccttcaaatacgacgacaccaccaagcacggtaccggccgcggcattgcttccacaacgccgtacaccaatcgcgaaaagctcatcacgttcaccggcacgaacaatgccagcatggaggtattcaatctcgatgccagcatgctcagcgacaccgatgagaatggcaccctctaccgtggcgtaggtttcgcctttacgaacatcgccgacactgcatctgtcgtaatcaatgtgaccggcaacgccagtaatatctcgttccacaacggttggcagttctggtggaacggtgcggaaatctccgatggctactccaactacaacaacaccgacgagttgaagaagaagtcggctgcatacgacaaagccgcccagaagattctatggaacttcagcaataccgataacctcaccatctacggtggcgtggccaatgaggacggtacgaacaccaatgccgataaaattacccaggatgatgccgccgccgcgatgatgggcagcattatcgtcaggggcaacttcgaatcgcatgtttccaccaacggccgtgtgtacacgggtggcgacttctccatgtacaacccgtacaaggcatggacgttcaatcaagccggtgcgaacgatggtgattccgcctctgtgctcgacatggatcaggagcgtcacaacttcccgtggaacggttcgtacaccgagtcctgttctgctatcgcgtggcagaaggccgatgaaagcggcaccctgctcggtggcacgacgtgggctgtgtacggtaagtacgatgatgccgcaagcggaaagaacgcactgcttaccgtgcaggataacgcgttctacgacaaggactctgccgatggccggttcactgtggaaggtctgaaacccaacgcagcctactacatcaaggaagtctccgccggcaacgattaccagctgaatacgaacgtctattacgtagcgactggggactcatcggcaacgccggtcaatgtcacgcaatcggtgacaaagacggacggtgcttatacgtacggcagcgccgacatgaccgatggcaagatcgtcaacaaaaagaacggccatgaggtttcttggtcgaaggtcgatgccgacactaacaaggagcttaccggctctcagtggcagattcagcaggtgaaagatggcgcggccactaagagctggaacgtcacagacaacaccagcaaagcaaccggcgtaacggtcaatccgacctcagccacgttggattctaccaatgggtggaagaccgatttgaccgcagccgtcgatccgaaggatgccttgcaagaggttgcatggacgttcaccgataaagatggcaatgctgtcgattcgtccactgttgcggtattgacccgtacgggtaatctgaaaaccaccgtcaccggtatcagcagcattgataccactgtgtatgtgaaggcatgctcggtctccaatcctgaggtgtgcagcgccctggtcaccatcaaggtgaaagctatgagcgtcaaggatttcaccgtcaaggattcctcgaaccggactgttgagaacaattccaccatcaccgctgctgcagtggatagcacgctgacgttcaccgcttcctccactccggctgtcccgattacttgggagtcgagcaacaagagcgtggcaacggttacttccagcggcgagaacggtcagaaagcaaccgtgacgatgacgggattcggctctgcggtcatcaccgcgaaggccggcgacaagaaggtttcgttcacggtcaaggtgccgtctaccacggtgtacttcaagaagtcgttgatgaattggtcgaagtactacgtgtactacaacgctggcaacaataactggaagttcgtggagatgagccagagctgcggtgattatgtgtatgccatattgccgaagcagtcgcctggtacggatttcttgttccacggtgacgatgaaaacacgagcaccaacaagtggtaccaggggtcgaataagagcgatttcaagttcacgggcaaagaagtgcaagtcgtgaaccagcataacgattcacaggtctccaccgctccggccggctgccctgcatctgccgcagctgctgcccagtcgaatgatgcggcggtgctcaacgagaacgccgtggcgacgcccgccgatgacccgcagcccagtggtgctgacggtgttgccgaaaacgctattgacgatggtgcaaaggccatttcctgcacggcagccgacggcgagaacggtcggcccggcgtgaagtgcgatatggacaccgcggccggcaaattcaaggtcggtggtctggatgccggcacgtactggctccatgagaccacggctccgtacggatacacgatcaataagaccctataccaattcacgattgatgccaatggcaacgtcacgtggaacggcggttgggccagcggcgaggcgactggcgccatcgatgaaaagctgaagcccggtgacaacaacgcaatctcggacacccctaccgaagtgacctggaacaaggtcgacaccaagggcggcaaacttgccggttcccagtggaagatcgttggtccaagccctgcaacggacgtgtactgcgtggccgacaacgtgacggttgatgccaatggtgccaccacgccggcaggcatcgagttcacgggctgcactggcgaaaagctgtccgatgccgcgaacaccgcagacgaggccggcgtcatcacggtcaggggcctgccggtcggcacgtacacgctaaccgagactaaggctccagacggctacgtggcaacaaccacggtctacacgcttaccatctctgacaccaaagcttccaccgttgtggctcagaccgcgaccgataggcccacgacccgttctggcggcaatcgcgaagctgcggccaatgtccccaacgcttcggctccggtgaacatccaaatcccggtaaagaagagcgtgaaatacacgtcgtggccaaaggacagcaacggcaactacgtcaacttcaacttcaagattgaagcgaccaagtcgactgtggacgcgaaccccgccgcgccgatgcctgccgaatgcagtagcagcgacgcgaccaagaatgactgcaccatctccttggctccgaagtctgacgctgatgatctgtccaacgtcatagccaagttcggcaagatgacgttcaccgacgcgaacctcgcggcggcagctggcgacgccagcgactacgccaagacctacacctacaagatcaccgagattgtgccagattccgccgacgcggtggaaaacctgcgctactcgaaggcggagtaccaagtcgtagtcacggtcaagcaagccaaggattccagcggaaagctgtccggcttgtccgtctccgccacgatgacacgcatcaaggatgactccggcaatgccgaagctggcggcggaaaggtgatcggcacatggtcatcaacgtccaccggcagcagcgccggaaccgccgtcgaagcaaccttcgtgaacaccaaggtgctcaccggcctgcccaccacgggcgccgactggaccggacgcctagtgcttctggtcggcgacggattcatacttgctggcgttctcatcgccggcggatatcaactggccaaacgtcgacgggaggaggactccgactgatttttctccctaggccactcgattggccgcctaccaacactcataactgaataaccaatattcaacacaatcttcttcttcatttcagagaaaggaaaagagaaatgaacaccatattcaagagggtgatctccggagccgccgctctgggcatcgccgtcagcggtctagccataggcgtctccaccgcgtatgctgcggatccggccaccggcagcatcaccatcaacaagtcagacactggtcaggtggatcacagcttcgatggctggcacctggcatcgttgaccaacgtcaccaaggatagtgctggcaagatcaacggcttcctcatcgataccgatgaccatatggccagaaccattgtcgccgcgatgactagcgatcaaaaggctgcatacgagaaagacgccaactactacagcgacgaccccgccgtcgccaacccgatggggtacttggtcgagaaggtatttaaggatacatctggcaaggcgctgagcgagctgaccagcccgtggggcggcgatagctccgcgctgcgtgcgttcgccaagtcgctgtccaaggaacttgccaaggccggtgctcccactgccgataagaccggtgacagcgcactgaagaccggtgagaacaaggaactcaaacagggcctgtggttcctcaaggatgtcacgaccacggatgacaccaagggtaccaactccatcccgatcatcacgccgaccaccttcgatggcgccgacagctggggcacggtgacgctgaagaacaccaccccgaccatcgacaagaagctggttgattccaagggcgacggcacctacacgccgaacactcagccggattacgcagttggcgatgatgtctactatgagctgacctccaccgtgccggtctacaccggctacgacatcgattcgacgatgaaagacgcaaccaagacccgtatcttcaagatcaatgacaccgccagcaaggcgctgaccgtgtccgccgacaccgtcatcgaatctgtcaagctgactcctgctcagggtacggccgtcactctggtcaaggacaaggactacaccgttaccgtcgctgactatggcgatgtgaacactcctaacaccgatgcctacaagggcggacacgtgactactatcgaccttggtaagtacgtcaacaaggccaaaggctctcagtccgctactgacggcatcctcgaaggcgccaccgtcaccgtgatcgtcaaggctaagctcaacaaggatgcgctgatttccgagcccggcaatctgcagaagaacccgaacaaggtcgacctcgaatactccaaccacccggaagaagtgaaccacgcccataaggttcctggcccggaagtgcccgtgtatgcctataagttcgacatcttgaagaccgataaggctggcaccactaagctgcccggcgctaagttcacgatcaaggcagtctccggtaccagcaagcacgacggcaagtacctcggttcttatggcaaggatggctggagctacctcgatagcgagccggcggtcgctgataccgatggtgtgttcaccactggcacagacggtaagatcaacgtctccggcctcgatgccggcacctacgaggtccatgagattgcgccgccggacggctacaccgcgattagtctgccgaagttccagttcaccatcacgccgaccgtcagcaatgaggtcgccggacgcaagaccatcaccgtcgtggcgctgagcctcgcgaagggcgccgacgtgcgtgccttgctgtcccaggacggcaagacgctgaacatctggaacgccaagaacatcaccgagctgccgaagaccggtggcgctggtctggccatgattgtggccgtcggcgcactgttcatcgcggcctccggtatcttcgccctccgcgctcgccgcaaggcctgagcggacacgcctagatagctaaggaacgacggccagcgcaccgcacttacccctcgcaaaccgccgttcctgctccgtctccggccgcatcgtcttgttcccgatcgatgcgcccggagattttttccatatttctttatttttgctgattctggagaaccgaatgacgcaaacaattatcatgaagtcccgtatccgcagggttttcttagctcttggggtagtgtcgtttattgagcggagatgagtccatccaatgcgaagcagcaccggagcaaaacaaagcggtacgcgcacacagtcacgcgtgtttactgtgctgtcggtgctgtttttgctgatcgggtttgccatcatcaccacgccgttcgtcatgcgcgccatcagcgaataccagcagaacgccaccgtgcagcagacgcagcgcgaggtggatggctggccgtacccacaggcggagaaccagctcaaaaccgcccgcgagtacaacaagaaactcgcggctggcggccagaccgccatcggcgaggtcaaagatccttttgccagcaatgccggccagtccaccacttccggcgcggatgattcgatggccgccaaagatcaagaatatcagagtctgctcgacgccggccaaggcgtgatgggttccatccgcattcctaaaatcgacgtcaacctgcccatataccacggcaccagcgaagatgcgctcgccgtgggcgcgggacacctttatggcacttcattgccggtcggtggcaaatccacacactctgtaatcaccggccatcgcggtttgccgaactcgttgctgttcactcgccttgatgagatgaagaagggtgattccttctacatcgaggtcatgggcaagacactcggctacaaggtcgaccgcattaccgtgatcaagcccgacgattccagcaaactgcgcatcaccaaaggcgaggatcgcgtaaccctcatgacctgtacgccttatggtgtcaattctcatcgcctactggtctctggtgtgcgtgccgaaatcccggaggaagtgcctgacccggacgatgtgcatggcatcaacaccacatggctggcgttgggagccatagtgcttttggccgtgctgttcgctttcatcgtcatattgatgcggcgtaagcaaaagcgcgatcgggaatttgccggcctcgcccggcacgccgcacgtccgacaaaataagcgccccgcgcgtctgcgattccgcgttgggaatatgaacggtttcgggtgccggactattcaaaaagcggccagattgtcgtaactcgatttcgaggggctgatttggcgtgttccggaggtctacttccgtttcgaggggctgatgccaaagtagacacagctacaaaacggcaaaatgacgttgatgcaaagccgtttctacttccgtttcaacggatgaggagccccttgaagcggaagtagacctccggcaaacacgaaatcagcccctcgaaatcgatctaggcagtctctctaccgtcgggaagcgtttcagcgcttctcgcggcgcattacggcggacagggactgcacgcgcggcaggtcgaagacctcgtcggtgtgcactacgtgcccttcgccatctgccagcggcactcgccagttggaatactcgctggacgtgcccggctgattctgcgagcggcattcgcccacgccgtccaccagcgcagcctgcaacaacagcgacggcgtatcagtgagcatggcgtgcatggcttcaacgatctcctgcacatgaccttccacgtcatcggccacagcctgcgtgatataaccgccctccaccagtcggttcatcatcgcggtgcgctcggccatggccgaagcggcaaacacctccaccggctcgctgagcaaatgcagctcctcgcgcagtttcacatgctcgaagttcagatagccggcggttggcggcagatcgtgtgtggtgaccgatgccagtgcctgcttgcggtactcctgcggcgcgcggtagggatcgccggcgttcggcgaatcgtccacgcggttgaaccactccacatcggtgccaagcacgccatgatcggccagaatgcggcgcacataatccggcacggtgcccaaatcctcgccgatcaccatgccgccggcgcgcgtggcctcgatggccagtacgccgagcatcgcctcgtggttgtacatcacgtaggcgccattgcgggcgccaagtccctgcggaatccaccacaggcggaacagtcccagcacgtgatcgatacgcaccgcgcccgcatgctcatacatggaatgcaccatttcgcggtacacctggtagccggtggcttccagataacgcgggttgaacggtggctggccccaatcctggccctgctggttgtagaagtccggcgggcagccgaccgtgacgccaccggaggcgaaacgctccgggttggcccacgcgtcagcgccgagcccgtgcacgccaacggccatatcctgcataaggccaagtgtcatgccatgatccaaggccgtgtgctgagcgtcgttcacctgctcggcggcgatccactgcagccagcggttgaactcgaacagatcatgatggtccttgaccagcgtctgcacggtcgggtcgtcgatggtcttctcgaagaaccagcggttctcgccccaaggtgcgccccacacctcgaagcacaggcaccaggtggcgaaggaattgaggtccgggccggccgtggccttgaaatactcgaactccagctcgcgcttgttgttgcggcccgcatcgaagatcaggcgcagggccgggcgcttggcctcccacgccgcgttgatatccatcggcgtggattcatcattgcgtgcggccaccgaggcatgcagtgcatccacctgggcgcgcacgtcatccggcagggtggcgtattcgggaatgtcttgcgggcgaatgtacgtcacgttgaggaaccggcgcgattccggcagatacggcgaaggctcgagcggcggaatcggcgcaccggcgtgaatcggattgatgagcatgaagtcggccttggacttctcggcggcatccgccaaaagacgcttcagatcgccgtagtcgccgatgccccaggaatcgtgggagcgtaccgaatacatttgcgtcatccagccccagcgctgatgctcctcgaccgccttcggcacggcgatgcgtgcgggggcggcgatgatggtcgccttgccttcgcgcccgtcaaccgtgacggtcagcgtgtggtaacccatcggcaggtcgggggcgatggtgagatccggctggccggagttgagattcggcagtagggagaagcggtcgaatgcggtgccatcttccagcgtgatggcggcggtgatgtccgcgtccgacgggcaattcagggtcaggcttgtcggcttgtcggtggtggccacgatggtgggcggtagcaaacgtttgctgttttcggcctcaagttcggtcatggaacgttttatggcctcgtcgctggaggcatccacatcgagggccttgagcacggcgactaatgcgtcatcgctgatttcggtgtaggtgccgagctggtcgatgaacgaggtcgcaagcccggatgctttggccaatttgatcagcggtcgagcaaggcgttcggcgctttccgttcgctgtgtggtgtccggtgcattggttgccgcttcattgctgcgcgcctcggtcataatagctccttgctgtgcgtccatgtactgctgttcgtttgcattgctgtttgagggccgctctacgttgaggatccggcaatctgacagaccaatgttgaacctgttctgctcttaccgtagctcatattgacaacgattgcaatagggcggtgagttgggccggttcggaggcatcgggggcgccggcctgttggccgcccccagtcggctttgccgacagcccccgccagcgggggcgaggccgagcgggtctctagccgaggatggcgaatgactgggcggggagtgtcaaggtgcgaccggatacggtgggggagccgagggctagcagcattgatgcatcgggacggagttcgctcggcagttccacggtttcaatccctcgaccggggttcatggctatgagcaacggccggcccgtagcgccatttcggtctgagacatcatcgcgagtggcggcgggagcaggtgccgagctggaatccgcggtcgtgcgtgggtgggtgggcgcgtgaccttccgcaggagtgcgtatgtaggcaaacacgcggccatccactggcgctgccaccacgtcgaatcgggcatcggaagccagtgcgggctgctcggtgcgcaatgccagcacctcgcgaacccagttgaacagtgaatcctcgcgtgcggcttcgctggcaacggtcggcgcgtcggcggccgaatcgaccggcagatataacgactcggatggtgcgcaggagaagccaagattcggcttatcggcatcccactgcatcggcgtgcgactgccggtgcgcacatagccgccctccttggtgggcagcggccggtatcgcatgccgatttcgtcgccgtagtaaaggaacgggcagccgggcatggtcagcagcatgccgtacgccaccttgagctcgcgctcggtaagcctctgtgctacgcgcaatgtgtcgtgattgcacgtgatgaggttgaaggtgccgctggctcgttcgcagtcgtgcagctgcggcagatattgttcgaggaacggtgcgattgacgtgccggaatcggcgttgaaatagctggcatccccctcgtgctccaagggggtgtctgtgttgcgcagcagcatgttgtagccgttcggatggccgtcccaacgccagtcgaggtagaagtccatgtcgaagccggcctgcatcgactcgtagggccgcccccattcggcgacgaacgctgcctcggggaattcggggcggattttcgagaagatgtattgccaggtgcggatggtgaaaggcttgccgtcgtcgtcgtgtttgacgaggctgtcggccatgtccacgcggaagccgtctgccccgcgggagagccagaagcgcacgacgtcgagcatcgcctcgcacgtggccagtgcttcggggccgagtgcgggcttctgccacgggtgtttggggtgggcgaagccgtagttgagggcgggctggcatttgaagaagttgatgatgtaggtgccgtcgcgctcggtttcgccgccaatgaagggcaggccgtcgccgccggcgatccaggagtcggtccagatgtagcggtcggagacggattcttggatggcggattcctggaccaccccccggattgcttcacaatccgacccccgccggcgtgggtcgaagagcgaagcgattcggggggtggtttgtccgacgggggtaacactctcgacggggagagttcgatcggcgtcaacgggggtaacgcgctcagtagggtcaggacgtgagctggcctggaaccaagggtgctcctcgctggtgtggccggggaccaagtcgagcagcacgtgcatgccgagcgtgtgggcgtgctcgaacagggcggtcaggtcatcgttggtgccgtagcgcggtgcgaccttcgtgtagtcgcgcacatcatatccggcatctttgaacggtgaatcgaagcagggattgatccatagtgcgttgcagcccaggtcatggatatagccaagccgttcggtcagtccgtgaagatcaccgatgccgtcgccgttcgagtcggcgaagctttgggggtacacctcgtaaaaacgggcggaactcagccaggatggacggggggatgcttcggcgtgtcgtacgcggcttgacatggaaactcctttgtttatgcgggttcaaggctatgcctatcgattgcaataataccagcaaaagcaaaactgcatacgtatgcaaaatgcgtgttatactaaaaaccaacgatgttcagcaatgttgcaaacgtcaaacatttcaaggtctaaccacgataatgcgagcgtatgcatcattcggtttcctatagaactgaaaacgtgtgcatcgaaactatcggaacaggaaccgaatcaggaaaggacagatcaatgaagatcgattggaagaaggctatcggcctcactgctgccgcagctatgttgctgcccctcgccgcatgtggtggctccaacaatgccggcgacgcaaagtccggcggcactgaagatgtgaccctgagcgtgtgggccccgcagaagggccaggacggcggcaacgactcctggctgagccaggtcgaagccaacttcgagaaggagcaccccgagtacaagatcacttggaagaacgacgtgctctccgagggcgacgccgccacccaggtccagaccgatccgaccgccgccgcggacgtctacatgttcgcctccgaccagctcggcgctttgatgaaggcccagggcatcggcgagctcggctccgacgccgagaagcaggtcaaggaacagaacggcgacctggaagtcgcctccgtgactggctccgacggcaagatgtacggcgttccctacaccgacaacacctggttcatgtactacgacaagtccaccttctccgaggatgacatcaagagcctcgacactatggtctccaaggccgcggtcgccttcccgctcaacgattcctggtacatcggtggcttctacgatggcctgaccctcttcggcgaggacggcaccgacccggatgccggcatggtgttcccgaaggacgccggcgacatcaccaagtacctggtcgaccttgccgccaacccgaacttccacaacagcgccgacaactccggcctgtccgagatacaggccggcaccgtcaaggccttcttctccggctcctggtccgctgccgacatcaaggaagccctcggcgacaacatgggcgtcgcccagctgccgaccttcaccgtgaacggtacaccgaagcagatgaagtccttcgccgccaccaaggccgccgcctacaacccgaacgccaagaacccgaaggccgccgcccagttcgccgcttacctcggctccaccgagtcccagaagctgcactacacggtgcgcaacatcatcccgaccgacaagaccctcaccgatctgaccgccgacgatccggtggccatcggacagaccgataccatggccaacaccgccatcctgcagtccggtctggccggcatggctgactggtgggatccggccaaggccttcggcgacgccatcctcaacaaggaagtcaccgcagacaacgctcaggccaagaccgacgcctgggtcgagcaggtcggttcctacgccaagtgatcgcttgacggctcgcagcacttggccggcgcggaccactcctccgcgccagtcaacccaacctataaccgaataaccaacaatcaaatatgaggggtccgtaaggtacgccagctgcgggcggatgatgtgaagccgttgcatccgcccgcagcccctcacctatcaacggtttcaaccttctttgtctctcctccttcattgccggcagagctcgggcagcgtgcatgcggtgtccgggctctgaacgggtttaagcgaagacaaacaaacaacaagccgggcatagcggcccggagcaacggtttccatcatttacagtgagaggcggtagggtgcaatgacagcagcagcactttccccgcgcgagatgaagcgccgccgcaaaatgggtgcggattatgtggcgccctcgccatactcggtaggcaacgcgcttaccaagggcgatgtgttcaccaaactatccgcagtcgtattcggactgggcaacatcgttcgcaagcaatacgtcaagggcgtggcactgctggcccttgaaatcgcattcttcgtatttctgttcaccaacggcatcacgtgcctgtccaagctctccagcctgggcgaccagaagcaaggcaaggtactcgtcgacggcttctgggagtacacccagggcgacaactccgtggtcatcctgctgtacggcgtctgcaccgtggtgctctgcctgctcttcgtctatctgtggacggtctcgctcaagtccgcatacaaggccgagtgcctgactcgagaacagggcaaggccccgagcctgggcgacgatctgcatgagctgaccaatgccaaggtgcaccgactgctcatgttcctgccaacgctcggcattctggtcttcaccgtcctgccgttgatcttcatgatctcgatggcattcaccagctacgaccgcaaccatctggtgctgttcgactgggtgggcttcgacaacttcgccaaggtgttctccaacagcggcggcaccgtcaacgcccgcctgttcctgcaggtgaccatctggacgctggtctgggcgtttttcgccaccttcctgaacttctttatcggcatgttcttcgcgatggtcatcaaccgcaagaccacgcgcttcaagggcttctggcgtgcatgcttctccatgtccatcgccgtgccgcagttcgtctccctgctggtcatgcgcaccatgcttcagcccaccggcgccatcaaccgcctgctcatggagtggggttggattgatcaggctctgccgttcttcacggatgccacttgggcccgtgtcacggtcatcgtgatcaacctgtgggttggtattccgtacaccatcatgcaggtcaccggtattttgcagaacatcccggccgaccagtacgaggcggccaagatcgacggcgcgaactggtggcagatcttcaccaagatcaccatgccgtacatcatcttcgtgcttaccccgtacctgatcaccacgttcaccggcaacgtgaacaacttcaacgtgatctacctgctgtccggcggcaacccggtgccggtcggcgattccgcaggcaagaccgaccttctgatcacctggctgtacaagctgaccgtcgataagaacgattacaacctcggtgccgtgattggcatcatgacgttcatcgtcctcgcggtggtgtcgctgatcacctaccgcaattccggttcctacaagaacgaggaggcattccgatgagcaggcattccgaacagaccatacagacgactgcccgtatgaagcgacccgaatcgcacggtctgatgcatgacaccaagaagcgtcgtattcttggcgacgtcctctcctatctcttcctgggagtcatggccatcatctggctgattccgattgtctgggtgtttgcggagagcttcaacaagaacaccgccccctacaccaagacgttcttccccaccgagttctcgctcgacaactacatcacgctgttcaccgaccgctcggtgctgaacttcccgaagatgttcatgaacacgttcatcgtggcgtgcttcgtgtgccttatctcggtggtgttcgtgctgtccgtggcctactgcatgagccgcatgcgtttccgcacccgcaagaccttcatgaacgtggtgctggtgcttggcatgttccccggcatcatggccgtttccgccatctacttcatcttgaaggccgtgggcctcaccagcgaaggcatgaccaccatcgccctgattctggtctactccgccggtaccggcgcgggcttctacgtgatgaagggatacatggatacgattccgacctcgcttgacgaggccgcgctgctggacggctgcacccgtctgcaggtgttcaccaagattatcatcccgatttgtaagcccatgatcgtctaccaggccatcatcggcttcctgaccccgtggctcgacttcgtgatggccaaggtgatttgccgcacgcagtccaattacacagtggcgctgggcctgtggctcatgctgcagaaggaatacatccagaactggtacgcgcgcttcgccgcagcagccgtggtgatctccatcccgatcgccatcctattcatcgtcatgcagcgcttctaccaggaatcgatgtctggttcggttaagggctgacgcgttaagcagacagcccagtgggctgtctgtagcgtcagcctgagcgaggcgatagccgggcgaatgtcggattgagcctcgccgcaggcgagtccgtaattgcaggactgagccgttacgtagtggggtttaacttggctcccctctgaagagggaagctggcgccgtaggcgactgagggggagcaccagcttacgccaatactcccctcagcgaggggagccagaaagcgagaaaggaccgcaatggagaggccgatttccgtggtggcggtggcggactggacgcccgccgagctagccatgccatgccccgattatcccgtctaccaggatggcgatctcggcgcgttccccgacgccaagggcaccacgttccgtatctgggcgcccacggccaacggcatcaccttgcgcctgttcgactccggcgcaccctatgacaccgtcgagcccttccagtcccgtgaaatgacccccggcacagccggcacctggcagattcactgcgacggcatcggccacggcacgtactacgactatctcgtccgtttcccggacggcaccgtcaatcgcacggcggatccttgggcccgcgcggccggtgtgaacgggcgccgcagcatggtcgtggacctggcgcaaaccaatccggacggctgggagcaggaccgccgcccgcacatccccagccgtgacctggtgatctgggaaacccatatcggcgatttcagcaacgacgagcacagcggcatccccgaagaacatcgcggcacctatctggcgttcacccatccggacaccagcgtggacggcgagggcgaattccccacctgcgtggcctatcttaagcggctcggcatcaccgccgtacagctcatgccgttctacgactatggttccatcgacgaatcgattccgcgaaccgaccccaagcacggcttcaactggggctatgatccgctgaattacaatgtgcccgaaggttcatacagcaccgacccgtatgacggcgccgtgcgcatccgcgaatgcaagcagatgatccaatcgctgcacgcggccggcatcaaagtgatcatggacgtggtctacaaccacatgttctccaccgacaactggttcgagcgcatgatccccggttacgcgctgcgccgccgcgccgacggcacgttcgccgacggttcggcctgcacgaacgatgtggccaccgaacatccgatgatgcgcaaatacattgtggattcggtggtctactgggctcgcgaataccatgtcgacggcttccgattcgacctgatgggcctgattgacgtggagacgatgaacgtcatccgcaccgcgctggaccagctgcccgacggcgccacaatcctcatgcacggcgagccttggaccgcccgggaaaccgcgctcgaacccggcacgattctggccgacaagcgcggcatgtcttacttgggcccgcggatcggcgcgttctgcgattccacgcgagacaccgtgcgcggccacgtgttttaccagtgggttcccggatacctgaccggtgccgccgccgattacgccgaggacatccgccatgccgaggatgcctggcgcggcacgttgcgcgaaaccgccagcgtggggcaggtggtccagtacgtttccgcccacgacgatctgaccctgtgggacaagctgtgtgcttcgatgcgccgagtgcccacggatgtcgactacgacgcccaggacgagtccagcacggatctgatacgcgccaaccgtttggccgccggcatcgtgttctccgcggccggtgtgccgttcatgctttcgggcgaggagttcgcgcgtaccaagcacggcgtctccgattcgtattgcagcccgtccgccctgaaccagttggattggcggcgggcgcagcgcatgggcgcgttggtgaatcattatgccgcgctgattcgtctgcgccgcagcaatccggcctactttggcggggcccgcatgatcgtgccgcgtaccgatgagatcgtggtgttccgtgtgggcgacgattgcgtggccatcaacccgaccggcgagccgcggactcagctggccaccgatctggagatgcccggcccgtacggcgaagtgtcgaaaatcgctcccgacgaatgggcctgcatctattgctccggtgacgagatgccaggcgaagtcgagaaccggcgattgcccctgccgtcccacaccttcactatctggcggcgcaatcgtgggtgaatatgaagcttgctcccgccggtgggggctgtcgaacagcatactgaacgtgatcaatgaacgaggggtcaccgctggtcatgctgccgatagcccacgccggcggggcttgtcatatgacgcgattttcttcgacctctacggcactttggtggacattcgcaccgatgaggagtcggccgcggcatggggcgcgctgcgcgccgctctggcggaatacggggtgccgtatccgaacaatgcttcgctgagggcccggttcgaaacgttggccgagccgattcgcgcggcggcctttgccgctcatggcgcacacgccgaacctgatctgctgccggtgttcgccggattgatgggttgtcgggatgcggcattggccgatcttgccagccgggccgacgccgtattggcgaggttcagagagcgcgatgacgtgatatgccgcgattcccaagccgccgcgcagacttcgcttgaggggaacgctgccgttcgggaaagccggatggatatggcccgggcgttggcttggacgtttcgacaggccagcaccagtatgctgcgcctctacccggacgcgctggaattgctggcgcgattgcgatccgtggggttgcacgttgtgctcgtcagcaacgcgcaatcctgctatacgcggccggagctggcgatgttgggcttggaatatgtgttcgaccggattgttatctccagtgaaatcggcgtgcgcaaaccatctcccgccatattccgccgtgccgcgcaggccgagggtgtggccccctgcagggtgctgatggtgggcaacgacgaacgttcggacattatgggcgcggctggcgcgggcgtcgatggcgtctatatgcgcaccgagatctccccgcccggcgatccgcaaaccagccagcacgccgtgcgctcgctgaccggccccgattatgctggattattgggatacttgaatatatagcttggctcccctctctgaagggagttgtcgccgtaggcgactgaggggagtttgcctgacacataggctcccctcagtcttgctgcgcgagccagctccccctcttcagaggggagccagaacaggaaggcgcaaccttatgaacgaagtggagatggcaaagcagcggcgtggtgagaagcgccgccgcaagggcctgtccgtattccgtctcaagatgatcggcgccctattcatggcattgggcgtggccggcgtctcggtcctgccggccatgttgggcgacccgactcaggacatggctgcactgaccgtggtggtggcgtgcacggcggcttcatggtgcgccatccccatctactcatggctgctgttcgacggctaccggcatacgggcagcattggaaaatatgtgctccgtctgttcatcgtcgcggtggtcagcgatgtgccgtacgacctgattatgaccggcaagccattcgacttgagcgcgcagaacccggtgtatggcttggtcatcgccctggtcgtgctcatgctggtggattggattgcataccagtacggcggggagagtctgcgcccgtggtccggtgctcagcgaggtggtgcggctgcggtgcgttggctgctgaccattgtggtcattctggccggactgctgtgggcgttgctgctgcgcgtgggcgtggatcaacggattatgtataccggtgtgctgacgctgctgtttgtgctggtgttctacttcctgaacgcgcgtgaaaatacgatgatgttcaccgccgggctgctgggtgccgtgatgtgcattacgcccggtattggtgtggccttcctgcactaccgcaatgacgaagtcgggttcaagcagtcttggaccaagtgggcctggtacgcggtctatccagtgctcttgatcgtcggcgcgctggcctagttacgccatttccccgaatggaatatcggtgctgcgcggcactagctgtgcctcgagcacctcgtgcgggtcatagagcgtcttgccgctgatgagcgtcaacgccttattggcagctgcgcggcccatcgcatacggatcctgacgcatggtcgtcaagttgatggtgtcggcataggggctgtcgtcaaagccgacaatcgaataatcgcgcggcgtgcggtggccgtaacgctccagcttgagcaccagcggaatcgccatcatatccatctggcagcagattgcgtccgggaactcatccatcgccagcagcgcggataatgcggagtcggcgaaggccgggccgcgcggcacggagagcacttcccaattgatgtcgtgcttgccttcggcgtccttgcaggcgttgatgaagccctgtgcgcgtgcgtcaatcgaggaatccagcccggctgcctcggaacaggggtagacgatgtgcttgtgaccgaggttgatgagatgctgcgcggccgtgtacatgcctttttcgtcgtcgatgctgatggtggcgtcaaagccttcggaagacggcgtattgatgccgatgatcggcacatgaatgcgctgcagctgctcgacctcgtgcggatcgatagcgaacgaggccacgaaaacggcatcgacattgcggcgaatcggcaggtcggtgaagaactcatgacggtttgcggcggtatcgatgtgctggaacagcgagatgtcatagccggccggatgcatcaccgattcgatgcccgcgaacgtctgcgtattgaaccagctggtgatctcctcattcatcagcatcgccacacggtaggtctgtccggacttcagggcggtggcggagcgggagatgttgaaatcgagcttatcggccacatccagcaccttgcggcgggtcttcgccgagacgagttccgggcgggtgaaggcgcgcgacactgtagaaatggagactccggcctccttggctacttggtagatgtctgccttgcccatgttcctcctcgtgcaattcgtggtatcagctatgccacgtaatccccctaacgggttgcgccatccacgatgtgcaatcatttgtatcatacactgcaaacgttagcgcgaagctgggggaagtgttgcttggtgtggtatgctgattgggacatagtgttgcgaacgtatgcagtctgtcaactgtgctgcatgccgtttctgcaggagtggtgctgaaagtgttgcaaacgttgtcaacggtctgaccgtgcgatagggggtgttccccttcatggttcgtgcggtcaatgctcaaggatgagagaaaggactcatatggccgtacgacgattcagctcgctcgccaaacgccttgccgtaaccggcatagcggtggcaatgtctgccacaacgctggtagcattgccggcttctgcggacgagaccgaggccaatgcacaggcgcgcacatctgttggcgcgccgggcgatgtgatcgccatcgcattccaaaccaactggaattcggtggccaaggagtgtaccgaggtttacggccccgaaggtgtgggctacgtacaggtctccccgccgatggagtccattcagggcactgaatggtggacctcctaccagccggtcagctacaagctcgactccaagctcggtacggaagccgagttcaagaccatgatcgccacgtgcaacgcggcgggcgtcgagatcatcgccgactcggtcatcaaccacaccaccggcgccgatcagggagagggcaccggcgtcgccggcagcaagtacgacggcgagggcaacttccccgcaatcccgtacaccaaagagaacttccacgactgcaccaagaacatcggcgactacaccaacgccgacgaagtacagaactgccgcctgaccagcctgcaggacctcgacaccagccaggaatacgtgcaggacaagctcgccgactacatgaaccgcctgctcgacctcggcgtctacggattccgcgtcgacgcggtcaaacacatcgccacggccgacgtggccgccatcaaggccaagctcgccgagaagtccggccgcaacgccgacgatatcttcttcgagcaggaagtcatcggcaacgcctccgaagccgcggaaatccagccgagcaactatgtggcgaacggcaaggtctccgaattcaacttcaccaaccacctgtcggtcgccttcgccggcgacatcaccgacgccagcaagggccttgcgaaggtcggcggcgacggctgggtgagctccgacaaggccgcagtgtgggtgaccaactgggataccgagcgcggatcggccatcacctacaagaagggctcgaagtacctgctcgcgaacgcgttcatgctcgcgtacgactacggccagccgcacatctactccggctactacttcgacaactccgacgacggcgctcccggcgccaccgaaacctccgtgcccgacatggagtgcccgaccgacggctcgatgacctccggcacctggcagtgcgccgaacgttggaccgcgatccgcggcatgatcggcttccacaacgcggtcaacggcaccgacgtcaccaactggaaggcgtacgacaccaacgtgctcggcttcggtcgcggcgacgtcggctacctcgcgctcaacaacagcgccgacgactccaagcagacgttccagacgtcactgcccgccggcgaatactgcaacgtgtacgccaccggcgactgctctgcaactgtgaccgtgaaggacgacggcacgttcgacgcgacgctcgcgaagaactccgccatcgcgatctacgcgggcgcgaccaaggattcctggaccggcacgaccaagtccgatccgtccgatccggacctgtccgtcaacgacgagaccaagaaggccacggccgacacgagccgcaccatctactacaagctgcccgacggctggaagcaggcgtacctccactacggtatcgacggctgggccgagcagggccacgagctgatggccgacgccggcaacggctgggtcaagttcacggtcgatccgaagggcaagtccttcgaatacgtattcaccgacggcggcgacaactgggacaacccgaatggcggcggcaactacaccgcgcagggccactggacggcggtcgccgaccacgaggccagcgccggcgtgccctccgacgtgcagtcgtaccagcccaagaccaaggtgatcgtgcactacaagcccgccgaaggcgacgccgtcgccgatcgcggcgtgtacatgtggggcaccgacaagaacggcgccaccctgaacggcgcgtggcacgccttcaccggcgaggactcctacggcaaggtgttcgagaccaccatcgatggtgcgtacgacgccgccaagatcggtgtgatcgtcaccaccgaaggctgggacaaggtcggcagcgaccgtaccatcgacggttccaccggcaccgccgaaatctgggtcgacggcgccaatccggacgaaacgctcaccgaagcccccgacggctacaagaaggccgccaaccagatcgacgtgaccatccactaccaccgcctcgccgacgactacaccagcgaagacggcatgaaggcatgggacatctggggctgggccgacggcgtcaacggtgccgcctacccgttcaccgagcacgacgactacggcctgatcgccaagtacacgctcaagggcagcggcatgagcgctccgcagttcatcgtgcgctacggcggcgacagctgggaagccaaggatccgaacgacgagaaccgcacgatcccgcagtccgccatcaccgtgaacgccgacggcaccgcatccgccgaaatctggctggtgcagggcgacacgacgatctacaccaacggcacgctctacgacgccaagggcacgatcgtctccgccgaaatgaccgacttcaacaccatcacggtcaagctcaacaaggcgctcaccatcgacaagccggccgacgcggtgtcggtcgagggtgcgaagatcaaggacgtgaaggctagcgggaacaccgtgaccattaccgcggccgacaatcttgacgtgaccaaggcctacaaggtgacgatcgaggactacggcacgcagaccgtgtcgctcggcgccgtcgtgcgctccgacgcgttcgacaagaagtacgcctacgacggcgatgatcttggcgtgacctacaaggccgagaagtccacgttcaagctgtgggcgccgaccgccaccaaggtgacgctgcgcctgtacgccgactccaccgatccgaaggcagcgcagaccgacgccgtgacgctggagaagtccggcaagaagggcgtgtggacgttcgccgtggacaaagatctcaaggattacgcctacgactacgagctgaccttcgccgacggcacggtcaacacgtccgccgacccgtacgcgaccgccgccgtggccaacggcgagcgatccgtcgtgctctccgacaaggagaagggcgatgccggcaagcgcatggcgtcgttcagcaagccgaccgacgcgatcatcaccgaggcgaacgttcgtgacatgaccatcaacccgaactccggcgtctccgaagccaatcgcggcaagtatctcggcttcgtcgaggagggcaccacggtcgacggcaagcagggcgcggcgcccaccggcatcgactacctcaagtcgctcggcgtgacgcatgtgcagatcatgcccgtctacgactacggttccgtggacgagaccggcgatctgagctacggcgcgcagtacaactggggctacgatccggagaactacaacgtgccggaaggctcgtactcctccgacccgagtgacccgagcgctcgcgtcaaggaaatgaagcagatggtctccgggctgcacaagaacggcctgtacgtggtgatggatgtggtctacaaccacgtctacaacgcctccgaacacgccttcaacaagaccgtgcctggctactacttccgctacgacgccaatggcaacctgaccaacggctccggctgcggcaacgacgtggcttccgagcgtgcgatggcccgcaagtacatcgtcgattccgtgaagtactgggcgaccgagtacaacgtggacggcttccgcttcgacctcatgggtctgattgaccagaccaccatgaatcaggtgcgtgcggcgcttgacgagatcgatccgtcgattctcgtcatcggcgaaggctgggatatgactgacgccattggcaaccaggaaaccacgcagcccaatgcctccaaggtcaagggcgtggcgttcttcaacgactccctgcgcgacgcgatcaagggcagcgtgttctccgacgaggacaccggcttcatcgccggcaaggccgacaaggagaacctcatcgccaccaacgtgctcggttgcaacaacaagcgcgagggcatcgatgagaacggccactgcaacaacggcaccgccgacacgaactacggcggcgcggatcaggtggtgcagtacgtcgaggtccacgacaacctgaccttgtacgacaagctggtcaagagcgcgcccaacgactccgaggagacgcgactcgctcgcgccaagctcgccgactcgctgattctgctctcgcagggcatcaccgacatgcagttcggccaggagttcctgcgcaccaagggcggcaatggcaacagctacaacgccggcgacgcggtgaacgccatcgactggaaccgcacggtcgagcaggcgggttccgtgaactatgtgaagggcctgatcgccctgcgcaagtccatcaagaacctgcacctgagcagctatgatgacatcgccaagaacatgacggtgctgcagcagtccgacggcgtggtggcctaccagctgaaggacggcagcgacacgtatgtggtggtgttcaacgccaacgaatcggccgcaacggtcgaggccgtgccggctggcaagtacaccgtgctggccgccgatggcaaggtgacggagacgcaggataagaatgctgcaaccaccgtgggcgctgacggctaccaggccggagcgctcgccgctgccgtgctcaaggccggcgccgacgatgattcgaccaagcccgatggcggcaaggacgataaccagtcgggcggcaccgccaccccgggtactccgggcgatagtggcaacggcaatggtcagaccggtgacggcaacgcctccaacggcgcatccgacaccgcggccggccaatcccggcagttcggcgctgccgctctgcccaacaccggcgtagccctgtccgtcatggcggtcgccgtattggtgatgaccgctgccggcatgctgttgcagcggttctccaagggtggcaatgccgtcaacagtaaggagggctccgaacagtagtccacgccgcgtcagttgctgagtggcccccgctggcgggggctgtcagcgaagctgactgggggtggctcagagccgctccaaataacctgagcctacatcgctcaacttttgtgatgaatttgggaatagaacttgccaaacagaagttgagtgatgtaggctcaagttttggaaggcccaagaaccaaccaaggaacttgggcgaacaacgtaagaacaaacgaataattaaggagcacacattatggcacgtgcagttggtatcgatctgggcaccacgaattcctgcatcgctacgctggaaggtggcgagcccaccgttatcgtcaacgctgagggcatgcgcaccaccccgtccgtggtcgcgttctccaagtccggcgaaatcctcgtcggcgaggtggccaagcgtcaggctgtgaccaacgttgaccgcactatttcttctgtcaagcgtcacatgggcactgactggaccgtcgacatcgacggcaagaagtggaccccgcaggagatttccgcacagattctgatgaagctgaagagggacgctgaggcttacctcggtgagcccgtcaccgatgctgtcatcacctgcccggcatacttcaacgatgcccagcgtcaggccaccaaggacgccggcaagatcgcaggcctgaacgttctgcgtatcatcaacgagccgaccgcagctgctctggcctacggtctggagaagggcaaggaagacgagcgcatcctggtcttcgacctcggcggcggcaccttcgatgtctccctgctggagatcggcaaggacgacgacggcttctccaccattcaggtgcaggccaccaacggcgacaaccacctcggtggcgatgactgggatcagaaggtcatcgactggctggtcggcgaagtcaagaacaagtacggcgttgacctgtccaaggacaagatcgctctgcagcgcctgaaggaagccgctgaacaggccaagaaggagctgtcctcctcgaccagcacctccatctccatgcagtacctggccatgacccctgacggcaccccggtgcacctggacgagaccctgacccgtgcgcacttcgaggaaatgacctccgacctgctgggccgctgccgcacgccgttcaacaacgtgctgcacgacgccggcatctccgtgagcgacatcgaccacgtggtgctcgtcggtggttccactcgtatgcccgccgtcaaggacttggtcaaggaactcaccggtggtaaggaagcgaaccagtccgtgaacccggatgaggttgtggctgtcggcgctgccgtgcagtccggcgtcatcaagggcgaccgtaaggacgtcctgctgattgacgtgaccccgctgtccctcggtatcgaaaccaagggtggcatcatgaccaagctcatcgaccgcaacaccgccattccgaccaagcgttccgaggtcttctccactgctgaagacaaccagccgtccgtgctgattcaggtctaccagggtgagcgtgagttcgctcgcgacaacaagccgctgggcaccttcgagctgaccggcatcgctccggctccgcgtggcgtcccgcagatcgaggtcaccttcgacatcgacgccaacggcatcgtgcacgtgtccgccaaggataagggcaccggcaaggagcagtccatgaccatcaccggtggttccggcctgccgaaggacgagatcgaccgcatggtcaaggaagccgaggctcacgaggctgaggataagcagcgcaaggaagacgccgagacccgcaaccaggctgaagccttcgcttactccaccgagaagctcgtcaacgacaacaaggacaagctgtccgacgacatcgtcaaggaagtcaccgacaaggtgaacgctctgaaggaagccctgaagggtgacgacaccgataaggtcaagaccgctcagggtgagctgatgacctccgctcagaagatcggccaggtcctctacgcccagcagggtgctgaaggtgccgcggctggtgccggtgcggacggcgcttccgctggctcctcctccggttctgacgacgacaccgtcgaggccgaggtcgtggacgacgatgacgacaaggacaacaagtgatgtccgagttcaacaaggacgactacctgaacgacctgccggatccctcagatgctgaggctgccggccaggccgctcaggcctcttcaggggctgatgcctccgccgagtccggctctgcgcaggattcggctgcccaggctccttccaatgaaggagccgacgcggctcctgccgcagctgagggagagaagtcggatgccggagagaagactggcgaaggccagtccgattccgaagacaccctcacccctctcggcaaggccaagaaggaagccgccgattacctcgaagccctgcagcgcgaacgcgcggagttcatcaactaccgtaatcgtgcgcagaaggagcaggagcgcttccgccagcacggcattatcgacgtgctgaccgcgctgctgccggcccttgacgacatcgaccgcattcgcgagaacagcgagatggacgattcgttcaaggcggtggctgccaagatcgacaaggctttcgagaagttcggcgtcgagaagttcggcgaaaagggcgaggacttcgaccccaccaagcatgaggcaatcctgcacaagccggatgccgatgccgacaaggaaaccgtcgacaccgtggtggaagccggctaccgtatcggcgaccgcgtaatccgcgccgctcgagtagtagtagcctccccgcaaaactgataacggccagctcgctaacgagctgacattaccttggctcccgctggcgggagctggcagccgaaggctgactgagggtggtcaaacactgaatataaaccaccctcagtctcgcttcgctcgacagctcccgccagcgggagccaaccataaagacttttcaagaaaggagacatgaatggctgaaaacgaatggctcagtaaagacttctacaaagtccttggtgtctccaaggacgcttcggacgacgacatcaaaaaggcgtaccgcaagctcgcccgcaagtaccaccctgacgtcaacaagaccaaggaagccgaggagaagttcaaggacatctccgaagcttacgacgtgctgagcaagaaggaagatcgccaaaagtacgacgcgattcgccagttcggtatgggcggcgcccgctttgccggtggttccggtgccggcggcttcgacgcttccggcttctccgacatcttcggctccatgtttggccagggtgccggtggcaacggttcgcgtatccgcttctccacttcgggcggcggcaaccccaatctcaacgacatcttctcgatgttcggtggggccgcggggcagggtgctggcggctacggccagcaggcatacggtaacgccggtggctacggctatgaggaagccccgcgccccgaaaacggcgaggaccgcaactccaagatcagcttgacccttcgtcaggcggtcaagggtgcgaccgtgtccctgtccgtggatggcaggaagttcaaggctcatgtgcccgccggcgtcaaggacggtcagaagatcaagctggccggcaagggcaagccgggcatcaacggcggcaaggccggcgatttgtacctgcacgtcaccgtcaatccggattccacgttctcgatgcgcggtcgtgacatcgtcatgaacctgcccgtcaccgtaggccaggccgtggccggcggcaaggtcgacgccaaggacatcgacgggaacctggttaccttcaaggtgcctgcgggctccagctccggtgccgaggtcaagttggccgggctgggcgtcaagcgtggcaaccagccgggcgacctgatcggccgtgtgcagatcatggtccctgccaagccgggtctggcggtcaagcacgccgccaaagaattcgacgaaaaagccggcgactatctcaactaacaggggctcccgctggcagaagctgaatgagcgcaatcttggctcccgctggtgggagctgtcagccaaaggctgactgagggtggtcttggctcccctctctgaggggagccgggagtcgaaccgaaggctctcaaaatcacaggaggtgaacaatggcgcggttagccaaccagatgaagcagttgtacgcgatgtgtgcaaccgcgctcgtgatgggcagggccgatctcgacggagccgatgacgtcggcttcgacatcgaactgcccatcttcaccgtcggccagaccgccgagttggccgacattcacccccagaccctccgtcagtacgaccgcctcggtttggttcgtccgcagcgcacggatggcggcgctcgccgctattgcctgcgtgacattgcccgcctgactcgcgctcagcgcctgagccaggacgaaggcatcaatctttccggcatcgcacgcattttggtcctcgaagaagagaatcgccaactgcgccgcgaagtcaaacgcatgcaaaccggcgaccaggagagcgttttcgccgcaggccgtgacggcaatattgtggaggtacaacgctccaaccgcgcccgcctctggcgcaacgccatccaccgcgaaacccgcgaactgcccggccgcgatactgccgccgataccgctgccggcgccaccggcgactccaactccactcccgccgacttcaagtccatggtcctgtggggttggtgagtctggccgcattgcttcgattccttctccattcgtaaaactgtttgttatctcacatcgggcagctgccgaaaaagcacgaattttcttgatggagatgtcaaggtttgttacggtgacgtgcgaaaaccgattcgtaaggggtgctttaggctgagacggtatgtgccgaacccttcgaacctgtgagctaacactcgcgtagggaatgcgacggttgaactcctctgttcggctcggcatcccatatgcgcgttgagagagaggaagcgtatgtcaatacgcaaggagctgaccgcccagaacgtactgctgggttttcagcacgtgttcgtttccaatgtttggcttgatccggtattcgtggcaggagcgattggcttacctatcgccctgtcgtcgaacatgattacggttcttcgcagactaccaaattgattgcgggtaaagtcgccggatccaagccctgtctaggttacggagcaaaagtcgggttggcgttcattggccgagaggctttgcgccctgatacctatgccgataccgtgcatcgtgtggctgttgacatcgccacatatgaccagcaaagctgcctggctccgcagaccgtgttcgtggagactgatggtgccctcacccctcgtgaagtggctcagctgctcggtggcgagcttgagaatcagcagcgcaaatatccgcgctccgtattgagtgacgccgagaacgtggccattcagcgggcgcgcaccgacgctgagatgagagccttgatgggcgggaaggccgcggtgttcgccagtggccatagcacggcatggtcggtgctgtatcgagaacttgacggtagcggtgccgacgaggatgttgcttcgctgatgtcgccgttgaaccgcagcgtcaacgtggtggcggtgccagatttgttggacgctgccagaagactgacttcctgccgtggctggctgcagagctgcggtgtcgctgtggattcaaccagactgtttggtcttgcagatatattggccgcggtcggtgtgaatcgcatctgtccgctcggtgagatggatcgggcgaaatccggctggcatcatgatgggggcttcaacctcatcgatctgttgcgcgcggtggatgtcgaacgcggcagcgatgtgtacagcgattcgttcgatatggatatggaataggcctgtgccgttgcgggcagcaggggctggtagcagggcgaaaggcaagggtaatgacagagcaaagcgatatggcacggcgtccaatggtgaatctggatggcagaacagcgatcatcaccggttccggcaggggcataggagcggccgtggcgaaatgcctggcatcgcacggagccgctgttgtcatcaattacgtacatgacgccgccagcgcgcagcgcactgttgaagacatccactcactgggaggcttggctatagctgtacaggcggatgtttgcgatgaatcgcaatcttccaagctggtgggtaccgctgtcgactcattcggcggcgtggacatcttagtgaataatgctttcggacgcttctcctttgatccgcgtcgctgttccacttttgctggaggcgattgggatgagtttagcgcacagatcgagggatgcctgcatggtgcatatctgatgtgctcacatgtggtgccgctgatgcgagcccagacctccgggcgtatcatcaacatctccagcaatctggtcgattcgcccatcgtgccctaccattcgtatatcactgccaaaggcggcttggtcggcatgacccgctctctggcccaggagctgggcggcttcggcattaccgttaatgccattgccgcaggtttgacggccggaaccgcatccagcgcagccaccaccgaggatgttcgtgaacgaatcattgccatgacgcctcttggccgccttgcccgtcccgatgacatcgccggaggggtcgcgttgttggcgtccgacatggccggcttcattaccgggcaatgtctgcacgtcgatggtggtttgaccatgcgctgaggcgcaggagcggtgtgctgacgcgctatggttgtcgcatccggttggtgcaatggaatgcaacaagagtaaaggcgccgattggcgtgcggtcatgcgaacggaggtaaccatgctgctcaaagccgtgttctgggatttggacggtactctcatcgattctgagccgctctggcatgacggtgagattgagatcgcgcacaacaatggcggcgagtggaacgaggacctcggttgggagtgctccggcactccggtgccacacgtggcagaggtcatgattgcgcatggctgcacattgagcgttcccgaaatcgacaagcagctcaaggattatgtattcaaggcggaggtcgaacgtctgccgtggattcctggtgtgcaagacgtgctgcgttcgctcaaggaagccgacatcccatccatgctggtcactacttcgcctcgccgcatggccgagaacatcatgaagcaggctgatggattgcttgtcggctacgtctgcggcgatgatccgtacgagcacaagccgagccccgccccatatctggccgcggctgagagactcggcatcgcgcctgaagacatggtcaagtgcgtggtaatggaagattcctcatccggtctgcgctccggcgccgcctcgggggccacactgattgcgcagactggctggattcgcaccgacacttccggccttggccagtttgcctccatcgactcgtatgagggcatcgatgcggccgcgctggacgcctttgtgctgcagcgtttgggggagtaggaatttcgtttgtattgcggagtttgtgtgggaaaccccagtcgacctgatgttataggccggctggtagggtgtttgacggtttgcatataactgtctggttcattgggctggcagctcaatacaagatttaggactcacaggaaacacatgggcttcgttaatttcatcctcgaactgctgaaggatccgcgtgccgcgattgccggttggattgccatgggtgtggcgccgaccctcggcttcatcttcctcatcgtatttatcgaaacgggtgtggtgttcttcccattcctgccgggcgactccctgctgttcgccgccggtgtgttcgccgctcccgatgccacgaccggcaagtctgcgctgccgctgttctggctgctgccggtggtctggtgcgccccgattatcggtgaccagtgcaattacttcattggccacttcttcggccgccgcattatccagtccggcaaggtgaaggccttgaccccggagcgtttggccaaaaccgagcacatgattgagaagtggggcccgctggctgtgttcttgggccgtttcttcccgttcattcgtacgttcatgccgttcatctccggtatttccggcatgcgttggagccgattcaccccgttctcggtggttggcggcctgtgctggtccacgctgttcacgctgctgggttacttcttcggcaatattccggccgtgcaggatcacttcgaattggtgatcgtgctgattctgctggtttcgctggctcccaccatcatcggtttgctgaaggccaagttcggcaagaagaagccggagtcggttgccgattcccagctggatacgatggaatccggtatcgagaaccttaataagtagtttttggtgctgtagggttcgtttcttttccaagccccgttccgcatgcgatgtgcggaacggggctttgttgtgttatccacattgttggtggacaacatgccggggtgtggataattcggcaagctggaaccacagaacctgatttcggttgaaataggttggctcgcacggttcaatctccctatgaatatcgacacatcctctcgcactgttcgcgttgctcgctctccggcagcggccgtttcgtcccctccccagtccgctggggtcgggccctccccgccaccgcgctactacacccctcctccgcaaccaatggctgcgtatgagagaaaacggtcgaacaggactccggaagaatcgctctccacgaacgtggcattgcacaatattgtgaccgtgacttcgggtcacggtggcgtggggctcagcgtcatggcctctatgcttgcgctgacgctcacggagcgtgggcaaagctgcgtgctggtcgatgccgatttcgtggcgggatgcttggatctgctgctaggcctcgagcgtgagccgggtctgcgtttcagtcagatagacgctccgttgggccgtattgaaggagcggcactgcgtcatgagctcattgactgggagggtattcgtgtgctgccgtgcgatccctggagcacgcggcagcctgaatggtgggaagtgcaggccgtgattcgggcacttgccgaaacgcacgatattgtcatcgtagatgccggccagggaggcctgattgaaacagtgagtgacttgcgccatggagtgcaggttatggccgcggaactttcggtaatcggtttggcccgggccaaagcccatcggcttagattgtccgcatgggaatgcgggattccccatatcatcagcatcgaaccgagaggtacgccgcgaggtcgcgggagcgtggatgttgccgaagccgaagattatctgagcgctgcagtggtgggtcccatccgtctgacttccagcttgtgcggtgatgtgcttgagggattaggcatccgatccgtgcccaagggaagtcgtaaggccatcgaggcgctcgccgatgcggtggagcgggatattcgcgctggtgctcgggctgcctgattgaagtggggatatcatgacggcattgcatcgcgcaggcatgtttttcgggttattggatgagcttgcttcagatgatcgagtcactgatattgcggtgacttgtgagggccgcgtctgggcggatcgtggcagcggtatgcgggagcatatcttgcaagtgccattccgatcgccgcaagtggtgcgtgattatgcggtgcagttatgcgcgcaattggggcgtcgcctggatgatgcgtgccctattgccgatgcctccaatatgcatggtgtgcgtgtccatgcggtgatagcgccgttagtgccgcaaggggcgtcgatttccatacgattccccggcagcgaggtgacatcgttgcagcggcttgcccagttgggcatgtttcctgccggctggatttcggtactaagcgggctggtgagcaagagagccgccgtgctgattactggcggtaccggcgtgggcaagaccaccctggcaaaggcgttgcttgcgcagtgtgatgcgaatgaccgtatcgtcaccgtggaagaggtgcgggagcttggcgattttggccatgggaatcatgtttccatggcggtgagggaagcgaacgttgaaggcgaaggtgcggtgggccttcccgatttggtgaaagccacgctgcgcatgcgccccgaccgggtggtgttgggggaatgccgtggcgaggagattgtggatctgctgagggcgttcaactccggccaccggggcggcatgaccaccttgcatgcgaacagcgtggcgcaagtgccgcagcgtttgatcgcactgggattactggccggtgtggctcctcgtgcattggccatgcttgccgaaggcgccttcgatgcggtgttgcatcttgaacgagtggacggccgtaggcatattgcacaaatcggcactttgcacgcctcgtatggtgaattgcaaggcgttccattggtggcttgggacggttcggccgagcctcgatattcacctcagtggcgtgatttcgcggcattgtggggctgtagctagggggtgggatattgctctggtgtgtgatgctgacgatggtcgctgtgctgatatggcctagtcgccaatctggggttgttgatcgtctgcgtgatgtgcggagtctttctggaaggttcaatcgaggtgctggtggaggtttcgtgagccggaatgggtgggactcgaacgtcggaggtggtgctgggcgtagaacgacagcagcattgccgaggagcggaatcgctcaggtattggcctccgtcatcgctcgcatggcaggtggaggaacgctggtggaagcgttcgaggagcaattcggcggacgttttgccgtgcgcaggctgaccccacaacgcctgaccgacttgtttgagcggcgacgattgccggacgaatcacgcgcgcagtccgtgcgtgccgccatgggcgctgctgcggcagcgacagtcagcgaggaattgggctgccgtgccgtgccctgcttggaggcggtattggatgtctactcgcatatgagattgatgcagaacatgagggcgcaggccttcgctgtgcctcaagccacggttggtttgctcagcgcgttgccggcaatcgcggttgtgttgggggaattgatgggagctcaccccttgctgttcttgttcggttctcaacgcggcctagtgtgtctggtgtcgggcggatgctgctatgtggtcggtctggtttggatgcgcgccctgatgcgagacggctgacagctatcggggtgagacgaagatgattggaacatgcattgcatcggggtgcgcggcgttcgcatgctggctgagcatggtgaagccgcgtgcagccagtcgtctgcctgacattgggcaatgggcgaatcatgacgagcctgttgtggttgccgatgcggcatggaccatgctggtgctgcggatggtgcaagtgtctctgcggcaaggagcctcggttccgcgggcccttgatgttgtgggccgcgctgttggaggcgcatacggtcgatgcttaagccgcgtgggtgaatcattattgcgcggcgtctcatggtcggacgcatggtgtgccgccttagccgggacggatgcttcggcggggatgaaccattccgctcgtttgggtggcgcaaaacggcgaggccggtcagggcagcatggcgatacggatggcggtgctggtgacatcgcactgggcatgatccgcgagtctttggaaccggcttggttgcaaggggattctcccggagtgcttatcgacgctgctgtcgaacagcttgataaggatgagcgagcgcgtatagaacgtgccgctgcccgtttgtccgtgcgtttgctgatgccgactggcttgtgctttttgccggcgtttgtcattgtcggagtgcttccagcaattgcttctttcctgatgtaggtttcttctggcctgttttggttgtctcgtcttgcgttgtgccatcgtcttgcgttgtgccatgacgcatggctggtggttatccacttttgttgtggatgacacgccgcggtgtggataacttggcaagctggaaccacatgtgccgttcgctgatgcgccgcacgccggattgcttcacagtggaactcacctcgcgtcacagtgttcggcgcgagggccaaacgctatcgcacggagtcaggagagcgcacgattgatgtgggccttcccgtggggaaaggaataccgatggacacgcacattcccatcatcgttgatggtcaagcgggcatatttgcccacagcaaagccaaaatcgcagagctcaacgcccgtgccaaagaacgactatgcctcatggatgcacggatgcgcacgcttatggctgagccggaagaaggagcggccacagccgagtacgcggtggtgctgattgccgccaccgggttcgcggcgcttttggtcaccattctgaagtcggatgccattaagacgttgctgacaaatctgatcaaaaaggcgttgaacgtcgggtgagcgactcgggagggcaatgaacatgagaaaaggtctcagcagatggctcgcccgtttgccgcctgtgcacaatgagggtgcggccacggccgagttcgcggtagtgctgcccagcgtcattgcaataacgggggtgttgctgacgcttacccgagtggttgcggtatccatggattgccaaagtgccgcaacggcatccgcgcgtgaattggtggtttctgatgatgaatccgcagcacaacaggctgccgtgaatattgtgggaagccgagtggatgtgactgtgcatcaggaaggcagcttggtgcgagtggcggtcgaatgccccgttttgccagggcctttgaatgtgactcctactcgggtgcatggtgaagctgtggctgcgcggcaataacgcacacggtcggtcgggagggggaacggcgatggcggcatgtatgccacgtatgtcacgtcttgaagaagggtcaggcacaatggccggcgtcatgctggtcatgctggttggggtggctctttcggcaacggcgtgcattggcaatctggtggtttgccaaaaccgggcacgttccctagctgacctcatcgctttcgatgccgcctatgccgcatggcatgggtgggcggacgatccatgcgcattcgcgggtcagctggccgtatccaatagcgtcgcattgcccgattgcatggtgcagtcggatgatgtgcaggtcaccgtggcagtggatactgcagtcccattgacgccgcgcgtgcagcgaacggctcttgccggaccggcggaatgcgataagggaggtgctagtgagtaaccacacagcataaaacagggccgcattctagcggacttccgccatccttggctaaggtaaaagcatgagcgagagtgaacacaacgagcgccgcagcatcgtggcaatggtgggaaaccccacctccgataaaggacgcggtgccaaggtggatgcgcaggtgctgaatctgctggaagaggcaggtcgctcccataattttgaagtcatcgacattaccggtacgagtttcgaggattcattgcatcaggctcgtgaacggtcgcatgagtatgactacttggtggcggtcggtggcgacggcatgatagcgcttggcgccaatgcggttgggtgcagcggcaagcctttgggtattgtggccatggggtcgggcaacgatttcgctcgcgggctcaagctgccggtgaaccgtattgaaaccgcggtggaaggcatcgtgggcgccatcgtgcgcggttcgcatatcgatgtggacatgggccgtgtgacttccttggaaggtggttatgcggtagatacgtccaccggggaggaatacgagtgcgagggcgacaggtccgctgagtatccgatcgatcgctactatgctggcatgctctcctgcggtcttgatgcgagcgtcaatgaccgtgcgaaccattcgcgtctgccgaccggcaccatgcgctatttctcggcggtactggtggagctgacgcatatgaagcgttacggataccacatcaaggccacgttggccgatggttccgtggacgagagggacatcatcaccccgctgttgacagtcgcgaattcacggcatatcggtggcggtatcgaggtgtcgccatactcctgtttctccgacggattgctggatttggtgtggatggatcatgtgccgaacgtgcgggagtgcgcagtggctcttgcgaatgcgtataacggcaagctgcttgcctccgacgtatttgggtgggagcggattcgagaaatcgaggtcactcgcgcaaacgaaggcgatgagcctccggtgctgatggctgatggtgaatacatcgggcatttgccggttcgtgtggtggcggagaattgcgcgctgcgcgtgctggtgccgccggccgtggcggcacgtgaggtcgattccaggcagcaggtgctcgatgccatcacccgcgatggccgtgatcccgtgaccggacgctttaactagacgaaaatgctttggctcccctctccgagcggagctgtcggcgaagctgactgaggggaggtctgccgctggcagcggttatgcgatgtagctttcgatgtgtagagtctgtgcaatgacttccttgatggtgcggtcgctgacaccggggtgtgagcggatcagggagatcagtcccacgttgagcgtgaagaacgtctcgtggacgttggtgattggcagcccatgcatctgctcgaagtcgcgcactgtggtctgggcgatgtagtctgcgatgcggtcggcggcctggtcgatgaatttgatgtacagttcggcgttgccgtcctggatcatccggttcgagaacgggctttcgtcggcaatgagcgaacgcagtacgagaacgatttcgtcaagcgccttgttcacgttgccgatttcgcgggcctggttccattcctcgagcttggtgaggatctcatcgatcacatcatccagcacggcgtcggccacggcgtccttgtcgttgaagtagtggtagaacagcgatcgcgtcatgccgaccttgctggcgatgtcggagacggtgatcttggagaagcccttttccaagcagatttcgcgtgcggcgcgcacaatggactcgcggcgagtgtctccgcggctggcgcgcttgtcctcgagaatctggctcatgggtgcctcctgaatgtaactgatgttgacactatgttaaacaaatgggagtacgaggaaataccgaacaaaataacgtcaattccgaaaccgtgtggtgcatggcgcccatgaggtcgccaatatatcgacgaagcaatgaactgctcggaatggtatataccgaaacgatctctgttatttacgaaaaattgagtgaggggcaaggtaggttagtagctatggcacttgcactgtatcgtcgctatcgtccggacacctttgaaggtgtgatcggccaggaccaggtcacggttcctttgatgcgagcccttgacgagggcaggctcacgcatgcctatttgttctccggcccgcgaggctgcggcaagaccagttccgcgcgtatcctggcccgttgcgtcaactgcgccaagggcccaacctcgcatccgtgcggcgagtgtgaaagctgcaaggatctggccaccggaggcccgggatccatcgatgtggtcgaaatcgatgccgcctcacacaacggtgtggacgatgcccgcgaattgcgcgaacgcgccgggttcgcccccgcccgcgaccgctacaagattttcatcctcgacgaggctcacatggtcacgcagcagggcttcaacgcgctgctcaagatcgttgaggaaccgcctgagcatgtgatgttcatcttcgccaccaccgaaccggacaaggtgattggcaccatccgctcgcgtactcatcattacccgttccgtctggtgccgcaggaggtcatgggcccctatctggaaacgatctgcgagaaagagagcatcaagcctgagcccggcgtgctgaaactcgcgatgcgtgccggcggcggctccatgcgagacaccctgtccgtgttggaccagctcatggtcggttccgtcgagggcgtcatcacccatgatgccgccgtggctctgcttggtttcactcctgaagcgttgatcggtgaggccgtcgatgcggtcatcgatcataacggcgaggccctgtacggcgtgatccagaaggtcgtggtcggcgggttcgacccacgacgattcgtggaggatctgctggcccgcgtgcgtgacctgctggtgctgactttggcgggcgaccgcgcggaatccgtgctgtcagacacggccgaggccgaggacatggacgacctgcaccgccaggccaaggcccttggactgagcgcgctcaccgccattgcggatatcatcaacaccacgctgggtgccatgaccggtgccatctccccgcgtatgcgactcgaattgctggcggcccgactgctggccggcagcgaaaacgggttcgttgcacccgctgccactcccgcattgggagctcccgcgccagccacaggagctgtagcctctgccgctcccgctacgggaggtgcagcaggtggctttgccggcgcatctcgcggcggtttcgtcggggcctcacacggtggattcgccggcgctgcacgaaatcaagcacagacgcagaccgcgcccgcagccgccgcccctgctgcgcctgcatctcctgctacgaatgctgtggctccaagctccgactcccgatccactgatgaaaagtggaatgcagccgttgccgcattgccgcaggccatccgcgaatacgtcaccagagacaaggtgccgacggtggcattcggccccaaccgtaagggattgccctgcctgtccatgaccttcgacaagccgctcagccagcatgcgtttgcgctcgcggtggataacagcggcaaaaaggccgcaatcgtggtgatggatgccgtacgccaggaattcggtgccgatgcggttatcgctcctgcggccgttgcggccaacggtgagcgagtggaatccgtcaagcgcctgagccccgaacagttggccaaggtcaagcagcagattgcgatggccaaggcgggtctggccgcttcgagtctgggagctggcctgggcatgcattccggcagtgagccaaaagctcagaagccggctgctgaggggaacgccgaagatgcggatggcagccaccgagcctctggcgtaacgccgggagacacttcgaacaagcccgatttggatgatgacgatccatgggccaaacctgccgcatcgtctgaggctgtgggcgagccatctgcgtctgcaggtgagccgtctgttgatggttttgctccgagcaatccagaccctgcatctgcacaggcgcctgaagagcgccacaagaagcatgtcgccgtgccggacatgagcgatgacgtggacccatgggcaacgccggcagcgcctgtcgcacacgcacaaggtgcgaccgccaatacccaggccggccaagctgagcaatccgccgcgtctacttcctcgaacgtgggtgccccggctgcggattctgctgccccaacggcatccgctgacccgtggaaccagccggtgcctccgcctgccgaaccgatgggtgacccgtggaaccagcctgctgcgtctgcgccgcaagctgcgccggatccatggaatcaaccagctcctccgcaatcggaaccggatccgtggaatcaaccgcagggtcaggctcagcggcagaccccatcgcagagtcagggtatgccgcaaagccagaactcgggcgctgctgacccgtggaaccagccagtgccaccgagccctcggccgcaggttgcggccgaggacgatgagtattcgatgagcgaccagtcgcttggcgatgccacggccatgaagatggatgatctcaagaagctgttcgaggtcaagaaggtcgaggagtttgcggccgatgatccaaagaacccgaagaacatccagcccgccaagaagcatacggatgactgaccgcagcacatcatacgaaacaaagaaaaacatgaggagcacacatggcattggcctatgacggcgccatccagcggttgattgacgcattcgggcacctgcccggaatcggtcccaaaggagctcagcgcattgctttctacatgctgtccgcccccgaagatgaggcccgcgagctggccgaggccatcgaagaggtcaaggccaaggttcggttctgtgagatttgtggcaacgtgtgcgagacgagcccttgcccggtgtgcgcggacccgcgccgcgaccgcagcgtgatctgcgtggtcgaggagcctaaggacgtgatgagcatcgagcgcacccgcgaataccgcggcctctaccatgtgctcggcggcgccatcaacccgatggccaacgttggccctgcggatttgcgcatccccggcctgctcaagcgtttggaaggcgatgaggtcaaagaggtgatcatggcgcttgacccgaacatcgaaggcgaagccaccaccagttacctgacccagttgctgcgtccggtaggcgtcaagattacgcgtcttgccagcggtctgccggtcggctccgacctcgaatacgccgacgaaatcaccctcggccgagccctagccggccgccgcgaagcttaagtggcatctctctccttaagagtatcgtatttaacaaaattgccatatgtggcaattgccgaaccgtcgttgccgtccgctctgcagattgccgttgatcatgggttgcttgcgactaatatgacgattattttggccggcagtaatgaagggttcatggagagcgaggtgcttggccgtaaaagcccattgtatggtcgacgcactgcccaaatcaggttgttgccgttctattacgctgacgcagcgaaatttcttcctaacacgaagtcgcaggatttggttcgttattacgcgacttttggcggtactccgtactatcttgcgcgtatcaataaatccgatggattcgaagataacgtacttcgactgatgttcgacaaccttttagcaaatggtggtgtaatgatccgattgcgcgggaacggactgatattgatgtgattgcggctgattctctgagtaagcagatattgataggcgagtgcaagtggcgtaactcatttcatgagacggaagccgttgagcggctgcgtggaagggccggattaatccgcggttacttgccggagacagctcggtttgtgctgttttcagaaaatgaggtaggtgaatctatccgaaatcgataccgcgaggatgaacgtatgtcgtttgtgtctgtggacgacatgtatgccggatgattatacggatggtggcaactcgcctactggcttcttgactggctcggcaagcactcccaacgtatcgttggcgctttctccgtcgcggcgatgccagggccagaaagcggcgtgatgcatgatgcgtgcgggcttgtgccgccgcagtagccagatgatgaacagtccagccagcagtatgccgacaccgaccgcgatgccaatggttcgcccgtcgtgcacgtcgcgtggttcgggggcaggcacaggaatcgagacgcggtgcccggagatcaacagtcggtgcgtgttcacaccgtacggcgtacaggtcatcagcgtgacgcggtcctcgcccggcgcgatgcgcaactttgaggtgtcgtccggcagaatcactgagatgttatccaccttgtatcccaaggtctcgcccatgacttcgatatagaagaagtcgcccttcttcacctcgtccagacgggtgaacatcatggcctccaccagaccgcggtgtccggtgattaccgaatgagtggacttgccgcccacgggaagcgatgtgccgtagagatgcccggcgccagaggcaagtgcctcctcggaggtgccgtggtaaatcggcaggttgatggattgcttggggactttgatggtgcccatcacgccgttgccggcatccagtagcgattggtattccttgtctttcttggaggctgagtcctcgccgctggcgcgtgacccaccctgcgcggccgagaacggatcgaccgcctcgcccagtacgggctgaccggaatcggcaagcttcttgttgtaggcgcgtgcgactttcagcttgtcctctgcctgcgggtagggccatccggccacttgcttggcgctggtagcagcagtggcggccagctcctggctagattggaattgcagagccagcgggaaacaggccacgccgatggcggcgatgagcagaaggatggtaatgatgcgcatcgccagcagattgcgctggaggcggcggcgttcggctgccagatcggagacatcgacgacctcgttgaacggatcttgggcgaaagtgttgctggctgctgctgaatcgtttgttgttgtatcgactgatgcgtcggctattgctgcggcggatgcgtcggcgggtgcattagcgcgggaacgggcatgcttgctcttcgggcgtctatgcagaaaagccattttctgtgttccctctccctatgcctgctgccagggtgtgcgcatgcgtgtttgcctgttgactgccccgagtcttgctgtcacgtatgccatcgagtgtacgccatcaatcacagaacaattttcgcggtacgaggtactccggagaacctgattgcgcaactccccgtcatgggccccgccgacctttttggggaacagcacgcggtaggcggcgagcttgtaatagtatgtgttcgcgcgcaggtactccagtgcctcctgctcgtcgcatagttcgaacgcgacgcccctggccttgagatgcgctatctgcccctcggttgacagcatcggcttgggcgaggcgcctgaggtgtcgtcttcttgcggtgacccttccgagtgaatgggatgttggtcaggcatggtatgtcctttctcgctgcgtcgcccggcctcggtgccgggcgacggcgtagacgggagcataccggattaagcgcgtccgccaccatgttttcggacaatgtggttccagcttccccgatcttagggagtttctcgctgaggattggacggcaacggtgttgaatgtaatttttgtacattcaatgcactaatttttgtacattcaatgcgcaaaattgatgggttcagaatcggaatcaaaaatgggcgcaatcactttcgtgacttcgccctacaaaaaatggaattctatgcagcattggtcagacgataccgctggtacttgctcttgggcttgtccgggagcgtcaatgacagtttcccggcctcgaccatcggccgaatgtactctcgtcgcgtatattgcaggcttcggcctacatgatttgcgatttcctgcgccaatcgcggttcggcgcaatacgcaagaatagtattttcgacgtcggccgggcgcgggctgttcttgtcttggccgggcgtggcgtcatggtcgctagcattcgtttccgcgctgctgttgaagaaccgtacgaggaatgaacctctctggtcgataaattccggctgccggactccgtgtgtcctagcctcatcccgaataacggggatccccgagtggcgattttccgcgattttctcaatttccaaaattgaaactagcgtgggatttcgcgtcggcatgttggcatagcccaaatcgttgatgctttggccgccgtatacgccgcccggattccaacattccagcagatccgaaaacataacaagtcggatgggcgtgccgttgcagtatgggccataatcgcggtgcatgagagcattagtgattatttctcgtaccgcggtttccggatattcggggatgtccggtgcgttttccgtcgcgaatcacgactctcgtttttccgttgcgggcaacgaaccccagcgcgccttcgagcatctctgcgatagtgccctcgtaccgcttgttgtcgatgaagcgttctccaccgtcatcgggctgcaaaacagtgccattgactgcaatcgcggtaatgcaaaggttggggtagatgcgttgcgggtaatcgccgagcgtcatcattccggcaggcgtcggcttattgttttgcatggccccggtcaaagacagaatctcatcgtccgagcggcgggggagtagcctcaaagaacacccggcggaatcctgaatgtctgctggttgcgggttcaccgtcgtggtgcgacagggcggcatatcggttcagcggcacagcggtttagcggtggctatgcggtgccaccgaacatcgggtgtgcgggcggtgtacggcggaagcgcgcgggagcataatcgccaaggctattacggtgtccatatgccggcgatggttcgcttcgcgaacgcggcacctttataatcgttgcgtttgcgtagaataatcggcaaatactcccaagagaagaacaaaggacagcagtggctctcatcgtgcagaagtacggcggctcgtcggtcgccgataccgaatcgatcaaacgtgtggccaagcgcgttgttgagacggagaagaagggcaacaaagtggccgtggtggtctccgccatgggcgacaccaccgacgacctcatcgatcaggccctcagcatcgactccaacccgcccgagcgcgagatggacatgcttatgaccgctggcgaacgaatttccatgagcctgctcgccatggccattcacgccgaaggcagccgtgcgcactccttcaccggtcagcaggccggcttcctcaccgacgcccgttacggcgcggcccatatcaaggccgtcaagccggatcgtgtgaagaacgcgctatcgctgggagacattgccatcgtcgccggcttccagggcatcaacgccaagggcgatgccaccacgctcggccgtggcggttccgacacctccgccgtggcgctcgccgtggcccttggtgccgacgtttgcgagatttacaccgacgtggacggcatcttcaccgccgacccgcgcatcgtgacctccgctcgtcgcattccttccatcggctacgaagccattctggaaatggcctcctgcggttccaaggtgctggcgctgcgctgcgtggaatacgctcagcgcttcaacatgccgctgcacgtgcgctcctcgttctcccgccgccccggcacattggtggtgcctgacggtgtggatccgcgcacgctgccgaacatcgactgagcgagaccgaaccgaacccgaataaccgacaaaatcgttagcaatatcaagcaagacaaggcaagacatgactgaagaagaagcgaaatccatgggcgacctgttccccgacctgggccctgaagctccagtgatttctggcatcgcccacgaccgttctgaggcgctggccaccgtgcgcggcgtgccgaacgagccaggcatggccgccaaggtgtttaccgagctggccaccgccggcgtgaatgtggacatgattgtgcaggccggtgcgtccgtgggtactgcggacatctccttcactgtgccggaggccgccgtcaagcaggtgcaggacacgctgctcgacaagcaggacgtgctgggctaccactccttcgatgtggataccaacgttggcaaggtggccgtggtgggcgtcggcatgaagacccactccggtctggccgccaagttcttccaggccctgagcgatgagggcattaacgtgctgatgatttccacttccgagattcgtatcgccgcgcttgtgccgctcgaccagctgaacgacgccgtcaaggcgctgcacaccgcctatggcctcgatgccgaccagattgaagccgtggtgtacggcggtactggtcgctgagccgcgatttctactgcatatacaacgaaagccctcctcgcggagggttttctcgatttcaaggggcggattcgggttcttggggacatctacttccgtttcgaggggctcctcgaatgcgagatcccgagtataaacggcattgtgacaacgtcattccgccgtttttgcatgttgtctacttgtccatcagccccttgaaacggaagtagacgtccggagaacgttaaatcagccccttgaaacgcgagttggcgttgatttccggcagaatgggcaaaatgagtcagccgccggccggaaacatctcgctgtatggagcggaatatgcaaagcccgctacccgacgtgcatatagtcgaggtagcgggcgtgttacagacggttgcaactacttcttggtgatgtagccgagggccttgagcatttcggcgcactcgagggcgccgccggcggcaccgcgcagggtgttgtgggccagacctacgaacttccaatcgaagatggagtcctcgcgcagacggccgatggaaacacccatgccgccctcgtaatctacgtcgagcttgacttgcgggcggtcgtcctcggtgaggtactggatgaagtgcttcggcgcgtgcggcaggccgagctcggacgccttggaggtgtagttcaccagacgatcaatgagctcttccttggtggccttcttgccgaagttcaggaacacggtggcggtgtggccgttgagcacgggcacgcggatacactgggacgtgatcttgaggtcgccgtcgaacggcacaatcttgcccttgtcggcgtccacatggccgaacaccttgagcggttccttctcgctctttgcttcctcgccggaaatgaacgggatgatgttgcccaccatctcaggccaatcctggaaggtcttgcccgcgccggaaatcgcctgataggtgctgacgaccacctcgcgtggctcgaattccttccacgcggccagcgccggagtgtaggcctgaatcgagcagttcggcttgacggcgatgaaaccgcgtgtggtgccaaggcgcttgcgctggtgctcgatcaccgcgaagtgttcggggttgatctccggcaccaccatcggcacgtccggggtccagcggtgggcgctgttgttggataccaccggggtctcggtcttggcataacgctcttcgatggcgcgaatctcgtccttaggcatgttcaccgcggagaacatgaagtccacgttcgcggccacggactcggcgtcgtcgccgtccgcaaccaccatgtgcttggcgtattcgggcatcggcgtttccatcttccaacggctgccgacggcctcctcatacgtcttgccggcgctgtgtgcggaagcggcaagcgtgaccacttcgaaccacgggtggttttccagcagcgtgatgaaacgctggccgaccataccggtggcgccgagaatgccgacctttatcttttcggacatgatgacctctatgaccttcgggtttcgatgggctgatacgttcaagcgaccgtcttgcaatgaccgcaaacacacggtaattgtacgaaacatgcagaacaacagtggccgtcttcccatatggtggctcggcggcgccccccatggcgtaccccgcgccgcgcagctcgatatcctctccacaactggcaaagtgactagcgaagagacggcagtgttctacactggtagccatgtctattgcatcagtagaggcgcaaaagcaactcgaccgtatcgtggccctcggctacccggacgtggcggatatgagtgccgccgcattccgcgcgcttgccgagccgctcatcggcgcgctcgagcattccgatctcggctcgaacatcctactggtgcctacgcgcgagctagtctcgcccgaatcgctgattgcgcgaacctccatcaaccgcatggccggctttaccaccatgcctccgcgagacatcgccagcttcctgccgcaagacggattcatgccgcccgaaggcccgttctatctggtggtcgatccgcataccggcacctgctacatcaaccgcgagcccgacgtggcccgcaagctgattgattccgacgagcgtctgccgctcaccctcgaagaaggcttggccatcgccacccagcaccctgaatggctgttggaaaagaacggtttcaacctgcttggctcgcgcagcgcggacgggcgcgtgccgagcatctggatgagtcagaacgcgccgaggctcggcgccgtgtggccgaattccaagcacacgtggctcggcaacgcgttctgcatggcccgccgcggggtgtcgctgttccgatagggccggtggggcgttttgcggacatctactcgcctttccgagggcagtcgcatcggcgcgtgggggcgtgcggggggggcgccccgccgttggaatatggcgcaatatgaggggccgatgcccgtggcgtgcccgttgaggtgccctcggaaggcggagtagatgtccgcagcggcggagatccgccctcggaaagtcaagtggcggtcgaagcgcgggccgacggaacacgctcgttgcgcggcgttaacagattggacatcagacgtctgatgatagtagaatagaaatgctcaggcaccggcatttcaaggaggaaaccagcatgccatcattcgtcgtcggcgcgtacgcgtcattgccccaggggcgtgaagcccaggaaacctactacgacctgctcggcgagcagccgtggatcgagggcaccgagctgcccttccccggcgacctcgcggacaccaccgaccgcatctggctggccggccacctgcccaagcgctggcgcggcaacaccgtcaccgtcatccccggcaccatgcagcacgtgtggaaggacccgaacttcggcctcgccagcccggacgaggacgggcgcaaggccgcgctcgcgttcatgaagcagctgcgcgaggcgctcgccgacctcgcccagtggagggccagccaggacgtcaagttcatcgaaatccactccgcgcccacgaggatcgccagccgcgacgccatggccgcctcgctcgaggccctcgcgcagctggactggtccggcgccaagctggtgatcgagcactgcgacaagtacgtcgaggggcagaagccggaaaagggcttcctgccgattgaggacgagatcgcgctgtgcgggtcggccggcatcgggctcaccgtcaactggggacgctcggtggtggagggacgcacgcccgaaaccgccgtggcgcacgtggaggccgccgcgaaggccggcgtgctgagcggcctcatgttctccggcgccggcccggaggagacccagtacggctacggctggatcgacggccacctgcccatgaacccggacgagccgacctcgctcatggacgccgccgccatcaaggccgccgtgcgcgccgccgggacgcaggagcgcccgctcgactatctgggtgccaaggtgtgcgtgcccaaggacgcgacggtcgaggagcgcctcgactatctcgcgcgcatccacgaggcggtcgtcgcatgagcgcgggggcggcgcccacctacctcgccttcgacatcggcggcaccaaggtcgcctcgggattcgtgacgttgcccgcaaacgcaaacgcgggcgcggacggcaggcccgaggtgacggcccgctgcgaaatcccgaccgaggccgcgcgcggcggcgaggacctgaagaaccgcatcgttgccttcgccgtccgccagcttgagcgcgccgaggccgagggcgtggcgatcgccggcgtcggcatcgcggcggcgggcgtgccggacagcgaaaccggcgagatcgtctccgccacggacatcctgcccggctggcgcggccagcgtatctacgacgcgttcgcggccgtgaccggcctgccggtgcacatgatcggcgacgtgggcgcgcacggtctgggcgaggcgacgtacggcgccggacgcggcaggggtgtggtgctctcgatcggcgtgggcaccggcatcggcggcgcgatcgtggtggatggcgccctgttcaccggcgcgcacggcgtggccggccacgcggggcacgtgccgagcgcgctgggccgcggattcctatgctcgtgcggcacccttgagggacacatcgagccggtcgcgtccggcacgggactgaaggacctctacaatcggcgctgcgaggaggccggcgacgagaacctcccggctgcggacggcgccgaggtggccgcccgcgcggccgcgggggaggagctggcccgccgcacgctcaccgacagcgcccgtgcgctcggcgaatgcgtcggcggcatgggcaacctcatcgacccggacgtgatcgtggtctccggctcggtcgtcaaggccggtccgatctggtgggacgccctgcgcgccgggttcgccgattcggcgctcgcgctcgtcaagccgacgccgctcgtcgagggcgagctcggaggggcggcgccgctgatcggcgcggcggcggccgtccaccggcgcatcggcgcgccgggcgacgcgcgatagacaagatgcgacaacaggaaggaaccagcatgcatcaggcaatcgagaagatcaggggcggcctcgtggtgagctgccaggcgtacccgggcgagccgctgcgccacccggagaccatggcgcagatggccatggcggccgtggagggcggggctgtgggcatccgctgccagggcctcgcggacatcgcggccatcaagggccaggtgagcgtgccggtgatcggcatctggaaggacggcgaggagggcgtgtacatcacgccgaccctgcgccacgcccgctgctgcgccgccgccggagcggacatcatcgcgatcgacgcgaccggacgcccgcgaccggacgggctgacctacgccgagaccgtgcgcgccctgcacgacgaggacgtgatcgtgatggccgactgcggcagcttcgccgacgccgagcgcgccgtggaggccggcaccgacatcatctccaccacgctgtccggttacaccggcgagcgccccaagaccgacggtccagacttcgagctgctcggccagatgatcgaagcgtttccggacgtgcccgtgctgtgcgagggtcgcatccacacgcccgaccagctgcatcaggtcatggccgccggcgcgtgggccgcggtggtgggcacggcgatcacgcatccgacgaccatcacgcgctggttcgaggcgaagctgtgagcggggtggggcgcatgctcagcttcattgcagcgggcgatccgaatcgtccccttgtcgtcctgttgcacggcgtgtgcgacgcggcgattgcctggtccgactacatcgactatctcagtcatgattttcgcgtggttgcggtcgatatgctggggcatggcctgtcgccgcgatatgccgatgctcaactccgacgtccattcgaatccgcgtatgaggcgtttgaggaaaccgttgaatatcttgaacatgtccacggtggcagggcgatcatgatcgggcattccatgggaggtgcgattgtgacgatgctggtcaggcgtcgtcccgatctttgcctcggtgcagtggtcgaggatcccgcatggctgaacgatgagcagcgacagcggtatgtggacaacgcgccggccaatgcggcgttgctgcacgactgggcatccgacccggccaacgcgatccgtcacaatcagacgcgtcgtccgaattggccgatggaggatcatatcggctgggcctatgggcagaaccgatgtgatccgcgattggagctcaccggcgtggtcagcttcgcggaggactggcatcaggtggtgtcctcgatagaggtgcccttggtggtggtctcgtccgacgatccctcagatctcgtgggtgtgcgcgggctggaggaagtcagggccatggggaagccgaaccttgaaacggtgttcattcccgggtgtgagcacggtctgcgcaggactgacattgccgcgttcaatcaggcggttacgcccatactgcaccgctgggccgcatgtgaatctcatgtttccggcgaaatataagatgtctgatgtcttaacactgtcgttaccgcggtttgagaccgttgcattgcaaggaaaaaacgtggtagctgcactcataagacggctgatgaaacttgcaatcagacatcagatgtcatatgattaagaaagattcgattggacagagaatcgaatcctgattcagttatcactcaacgaagaggagaaaccgatgtactcgtggaaaacccgaatggccaagaccgccgctgcggtattggccggaacgctcgccttgagcggctgcggtgtaggaactggcacgacgaacgccaaggggggtccctccgtcgcggacaccatcaccgcgcaggtggcgtacagcagccgtgacttcaatccgctgtccacgtccatggccctgccgatggccggcaactggcatgtgaccgaggcgctgtacacgctgcagatgtccgactattcgttggtctccggtttggccgccggcgaaccggagaagatctccgacaccgaatacgtcatcacgatccgcgatggcgccaagttctcggacggtaatgccgtgaccgccaacgacgtcaagacctcgttcgagcgcgtcatggcgcccggcggcgtttacgctccgatgctctcgttcattgactcgatcaccgcgcagggcgacaacaagattgacttcaagctcaagtacgcgttcaccctgttcaaggagcgcatgtcgctggtacacatcgttccggccagtcagagcgacgcggacctcaagaagatgccgatcggctccggtccgtggaagtacgtcgagatcaccgatcagcaggtgaagttcgacaagaacgaatattacaacggcgaattccccgcgcaggtctcccacatggtgtggaacgtgaatgtggatgacaccgcccgcgtcaccgccatgcagaacggcaagagcgacatcatggagaacgtccccgccaaggcgttcgacaccctgaaggccgccggcgccgacatccagacggtggatggcttcaatcaggcgttcatcatgttcaacaccaagcagaagccgttcgacgacaagcgcgtgcgtcaggccgtgttctatgcgatcgacaccgagagcatgatcaagaaccagctgtccggcgaggccaacatggtcaccggcttcatgcccgagagcttcaagacctatcacaaggcctccaacgtgtatacctacaaccctgagaaggccaaggagctgctcaaggaggctggtgtgtccgaaggcgtgaagttcacgctctacaccacggatcagacttggatcacccagctggcgccgcagatcaagaacaacctcgacgcgatcggcttcaacgtggacattcagtccatgaagtcctccgctctgttcccgaccatcaccgataaggacgacgccgacttctccatggtgcttggccccggcgatccgaccgtgttcggcaacgatcccgacgtgctgctcaactggtggttcggcgacaccgtctggaccaagcagcgcatgttctggaacggctccgacggctacaacaagctgcatgagctcatggacaaggccgcccagtcctccggcgacgaacagcagagctactggaacgagtgcttcgacctgctctccgatgagctgccgatgtacccgctgttccaccgcaagctttccaccgccgtcaagaagaacgtgttcagctcctacaccccgattggaaccactggcctgtacttcctgaactccaagctgaacggctgatccacacaagtcattcgccatcacatcccgagggcgctgccgtgcaagcagcgatgctgacgcggcgacgcccttattttgcgcaaccatccatttgaggagcatatagagtgggcaatttacttcgtttgttgggaagacgattgatatccctgccgtttgtggcattcggcgtcgttttcctcgtgttcttcctgatgtcgttctcccaatacgaccccgcggtctcggctctcggcgaaaacgccacggccgagcagcttgcggcataccgccacgagatgggcttcgaccgatcgtggggcgagcagttcctgtcgtatctcggcggtctgttccaaggcaacctcggcgtatacggcgtgaacaaggattccgtgtcttcccgcatcgcgactgctttcccgatcacgttgcagctgacgttcatcgcgctgatcatcgccgtggtgttttcggtgattttcggtgtgctcgccgccctttaccgtgacacgtgggtcgatcaggtcatccgtgtgatttccatcatcgccatcgctaccccgtccttctggctgggcgtgctgctgatctacctgctgcagatcaagctggccctgctgccgggtgcgggcgagctcgtgccgttcagcgtggatcccggtgaatatctggcgcgcatggccatgcccgcgttctcgctgggcttccctgtcgccggacagatgacccgcatcatccgaacctccatggtcgaggaactggataaggactatgtacgcaccgccatcggcgccggcgtgcccaagcgcgtcgtcattgcgcgcaacgtgttccgcaacgccctgattactccggtcacggtgcttggtatgaagatcggctacctcatgggcggcgccatcatcaccgagatcatcttctccctgcccggcatgggcacggcgctgttcgaaggcatcaacggcaacgagccgattctcgttcagggtgtggtgctggtggtggctctcgcgttcgtgatcatcaacatcatcgttgacatgctgtacgtgcttatcaacccgagaatcaggacggtgtgacatgctgtttggcaaacccaaagtcgtggacgcggtgtcgcgtcccggagtgaaattcaaccgtttcagcaaaatgaccattggatccaggctcgcgttgctgtttatcgcgctgctggtcgtcgtggccgtcgccgcgccggtgatctcgccggaggatcctctcgccattaccgtgagctatcagtctccgaccgccgagcacctgttcggcaccgataacgttgggcgcgacgtgatgacccgcgtgttctacggcgcacggtattcgctcgtcatcggcctgctgtccatcctgttcgccttggtgctgggtgcgctcatcggcgcgatcgcggccgtggcccgcacgtggatctcggaaatcatcatgcgcgtcatcgacgtgttcatgtccgtgccgggcatcgccctcgccgccgtgttcgtctcgatcctcggccagtccatgttcggcatcatcgcagccatcggcatcctgtacgtgccgcagatcgcccgcatcgtgcgcgcgaacatcatcagcgagtacggcaaggactacgtgcgcgcggtcatcgtctccggcgcccgcgccccgtggattctctacaagcatgtgatgcgcaacatagccgccccggttatggtgttcaccaccctgtgcgtcgccgacgcgatcgtgttcgaggcgtccctgtccttcattaatctgggcattccggagccgaccccgacgtggggcaacatcctgtcctccgccaaggaaggcgtgatcttcggctactggtggcaggcgctgttcccaggcctgatgatcatgatcaccgtgctgtgcctcaacatcctgtccgagggcatcaccgacgccatggtggccgctccgaccgcgccgatcgaggaaaccgacgaagacaaggaagccaagcgtgaggaggatcgtctgctcgtcgatcctgtcgccgcctacgccgcccagcgcgagagcctggaggaatcccttgccaagctgcgcgaggccgaaatgaagcgcactgaccgcttcgagcccaagagcaccgagccgccggtcatcgaggtcaaggatttgtgcatcaagttcccgcgccacggcgacgtgaacgtggtggaccacgtgagcttctctgtgcgtcccggcgagaccatgggcctcgtgggcgagtccggctgcggcaagtccatcacctcgctggccatcatgggcctgctagacccgaaggccgagatcagcggcgagatactgttcgacggcaagaacctcgtcggcatggatcccaaggagcacaacgccctacgcggccacgagatcgccatgatctatcaggacgctctctcctcgctcaacccgtccatgctcatcaaggcgcagatgaagcagctcacctcccgcggcggcacccgcagcgctgaggaactgctcaagctcgtgggcctcgatccggagcgcacgctggagtcctacccgcacgagctgtccggcggccagcgccagcgcgtgctcatcgccatggccctgacccgcgacccgaagctggtcgtcgccgacgagcccaccaccgccctcgacgtgaccgtgcagaagcaggtcatcgacctgctcaacgagcttcgcgagaagctcggcttcgcgatgatcttcgtctcccacgacctcgccctcgtggccaaggtggcgcactccatcaccgtcatgtacgctggccaggtcgtcgagcagggctccaccaaggagatcctcaccgacccccgccacgagtacacccgcggcctgctcggtgccgtcacctccatcgaggccggcgccggaaggctccaccaggtgcccggcaccgtgccgtccccggcggacttcccgaagggtgaccgcttcgcgccgcgctccagccatccgacggtgggccttaacacccgcccgatcttcaagcaggtgcccggcacgtaccacttctacgcggccctgcccgacgacgcggacgtcacgcccgccgttgacgccccgacagccatcagcaaggaaggaggtgcccgatgagcaaggatccgaacgtgccgatcatcgagctcaaggacgtcgaggtggtcttcaccacccgagccggctcaattctgcatccaaacaaggtcaaggcggtcaacaaggtgaatctgcgcctgatgccgggcaagaccatcggcatcgttggcgagtccggctgcggcaagtccactacggccaacgtgatgtgcggcctgcagcaggccacctccggccaggtgctgttcaagggccaggacgtgacccaccgcaccgccaaggagcgcatggagatcggccgcgtggtgtccgtggtcttccaggacccggccaccgcgctgaatgcccgcatgagcgtcatcgaccagctcatcgacccgctcgtcgtgcacaagctcggcgacaaggcgagccgagacaagcgcgcccacgaattgctgcggatggtgggattgccggagtccgctctgtacgcattgccgggccagctctccggcggccagcgtcagcgcgtcgccatcgcccgcgccctgtcgctcaatccggatgcgatcatcgccgacgagccgacctccgcgctggacgtgtccgtgcgcgcgcagatcctcaacctgttgtcggatctcaagaagtcgctgggtttgtccttggtgttcatcagccatgacatccagaccgtccgctatgtgtccgacgaaatcgtggtgatgaaccacggaaccattgtggagcgcggaacggctcacgacgtgctgaacaatccgcaggattcgtacaccaagctgctgctgggcgccgcgccctcgctgctgcacccgaccgcggaggaatgtcggtaagccgacgattcactgtttcgccattccgccgttggcctccttcaacggggccgacggcaatggccgaccattatccgaataacttgattttgtaaaggaaccaccatcatggcaacacaattccgcggggtcatccccccggtcgtcaccccgctcaccgccgacggcgaagtcgacaaggtcagctttgcgcgctcgctcaaccgcatgatcgacgccggcgtcgatggcctgttcacgctcggctcctccggcgaggtcgcgttcagcaccgacgcccgccgccgcgagatcatccagaccgtcatggagattgtcgacggccgcgtgcccgtgttcgtcggctgcatcgacaccgagaccaaccgcgtgatcgagcacgccaaggaggcgaaggagctcggcgcgtccgcgatcgtggccacctgcccgttctacgcgctcggcggcctgccggagatcgagcgccacttccgcctcatccacgaggccgtgcccgagctgccgctgttcgcctacgacatccccgtgtgcgtgcacaccaagctgcctggcggcctgctcgtcaagcttggccaggagggcgtgctcgccggcgtgaaggactcctccaacgacgacgtggccttccgcttcctcgtggacgacaacgccaaggccggccacccgctcacgctgctcaccggccaagaggtcgtggtggacggcgcctacatggccggcgccgacggctccgtgccgggactcgccaacgtggaggccaccggctacgtgcgcatgtggaaggccgccgaggccggcgactgggccaccgtcaagaaggagcaggactggctggccgcgctcatgcgcatcgtcaccgtgccgcagggcgtcgcgggcttcggctccggcgtgggcgcgttcaagaccgccatggcgctgctcggcgtgttcgacaccaaccagatgcccaacccggtcctgccgctcaagggtgagaacgtcaagcgcatcgccgccgtgctcgaggagtgcggcatgacgctcgcccgtacgcccgaggaagtttccgcctccaccgaggcctgacatcacggcctgacgtcaaggtctgaaaggaaaacaccatggcagaagtcatcatcgtcaagaaccaggaggaggccggagagctgtacggacgctcggtcgcggacctcatcaaggccaagccgaacgcggtgctggggctcgccaccggctccagcccgctggccgcctaccaggcgctcgccaagatcgtcgaggaggagtcgattgacgtctcccaggtgcagggcttcgcgctggacgagtacatcggcctgccgctgacccacccggagtcctaccacgcgaccatccaccgcacggtcgtcgagcccttggggctcgacccggccaaagtccacgtgcccggcgacgtgctcaacggcacctcgctcgaggacggcgagaaggtcgcgggcgccggcgccgcctacgacgcggcgatcgaggccgcgggcggcatcgacgtgcagatcctcggcatcggcaccgacggccatgtgggcttcaacgagcccggctcatcgctcgcctccggcacgcgcgtcaagacgctcaccgaacggacccgcatcgacaacgcgcgcttcttcgacaacgacatcaaccaggtgcccacgcactgcatcacgcagggcatcggcacgatcatgaaggcccgccacctcgtgctgctcgcgttcggcgcgggcaaggccgaggcggtcgcggagaccgtggagggcggcatcagctcgttctgcccggcctcggcgctccagatgcacccgcacgccacgatcatcgtggacgaggaggccgccagccgcctgcgcaacaaggactactaccggtactcgttcgagcacaagccggcctggcaggcgatctgaccgcacgtggtcccggctcccttcgttgggaccgggaccacggcgttacatctgaaggaaggcaatatgaccgaaactcgtgaacaggtcgtcgctcgcgtgacggcggccgtggacggcgcggcggacggcgcgttcggcttcgaccggccgaacccggtcaccgacccgggcacgctggcggtggagcacgtctggtgcgccggccgccgcgtgagctgagcgggccgggccggacggtttgaccggacggtccgcccgctggattgcttgcaacgatgcaggatagttaaacaggaaacgtaatacgaaaggtactcccatgtcgcatattcccaatcaaatccaccagacatggaacagtgcgctgcttccggaacaggggggaacgctgcatgcggcgttccacgtcgccacggacggcatgctgctggaagcgcgaaacgccgaacgcgtcgcgctggcggtcacggtttcccgcgggtcgctggtcgtcgaagcgcccgaagaccatattgtgctggacgtcgaagacacctacggcgtgcagttcggcggtgtccacgaccttcatatcaccttcggcgattttggcacgcgaatctatctggatggctatcaggccttcgcctgcgcgaccaacatttgcccgtcgaagtatgcgcagaccggcgtcttccactgcgccaatgaagcgcatatcggcgttgagcggctggaatgtttcccggaggcttggacttcggagcgtattcagggcagcattcccgtgccgcagccggatattgagtttgccgcggcctatttggcggataaggatgtgaagacgctgcacggcgtgaccgacggcacgatctatgcgcagttccgcgtacgtggcgtcggacagttcggcacgattcttgcggcgcgcgatgacgatcgccagatcatgaacgtggacattgacgatgacggctttgtgtaccgcgctttcgtcaaaggacagtggtgtgagtatcgcgcccacggcgattggaacgatggcgggtggcatgatctggtcatccgcgcattccgcggtgcggtggacatctatgttgatggcaacatggaaacgcatcagcccggtcaggtgttcttcggtgatctcgaggggctgagctacgtgtcgatcggcgaggacacggccggtgtgcggttgtgcggcgaagttcgcggcggcggtctgtttctgtatcctctgggagaagggcagattcgcaaaatctccgacgtgccgcccaccaccgataccgcgttgttcgacaaaggatatgaaggatccgcaagctaccgcatcccgtctttggtgaccacgccctccggtgtgacgattgccggtgccgaccaacgtgtggtcatctccaacgatgcccccaatgagatccatttcgttgtccgccgctccttggatagcggacagacgtggctgccgctgcaaaccgtcatcgcctttcccggtgatgggctggatggcgcgagcgtcatcgactcatgcatcgtctgtgatcgtgagacaggccgtgtgacggtcatcatcgaccattttccgggcggtcgaggcttcgccaacgttgaaaagggcttggggctggatgcccggggacggctcatcctgcacgatggcgagggggcggaatatctgctccaacctgatggtgcggtaacgtccttggacggagaagccacgtcataccgtgtggatgaggatggcaacgtcacacgcgatggtgagtccgcgggcaacatctatctcaaggagggcgtcgacccgcatgaaagcctgctgaccgcgcgtaccagctatctggtggaagtgcattcggacgatgacggcgaaacatggtccaagcccaggcacatcaaccatatggtcaaggaaggatggatggggtttctgggcacgtcgcccggcaacggcatccagctgagcgccggcaaacatcgggggcgactgctcatcccgtactattgcaccggcacgagccccaagttcaacgcaggcggcgcgctgatctccgatgatggtggccagacgtggcgcagaggcaaagccatcaacgagggacgcgtagtcaacggcaaggtcgtggacgaacgggacgtgcgcgatgacgatgccaccacgcacgaatcggtgttcgtggaacgggccaacggcgatgtgctgtgcctgttccgcaatcaacatcatctgggcagggtcggcaaggccgttagccatgatggtggtgatacatgggaaaccgttgagttcgatcccgatctgccggacatcttcagccagcccaatgcggtgacggtcccgtccaaagccgacgaggagcccggctgcgcatccgaccggatcgttttcgccaatgctagcctgatgcgtccctaccgtggctgcggtgtgctgcggctgagtgaggatggcggccgcacgtgggcgcgcaatcggtgcttcaatccctatcactatgtctaccagtgcatgtcggtgctgccggatggggccattggcctgtcttgggagcgggaaacggccggagtgtacttcacgcatctgccgctgagctggttcggagtgaagtcggctgcggaggagtgatcctcggctatacgtgaccgtgcgtacaaaggcgtcttcctggcaactctggaagacgcctttgtacgcagcatgtatattttttgtacattcgatgtacaattttttgtacattcgatgtacaataattgcatgtccgattacattgcccggcctctggctgaatccatcctgcatgctcgacgcaaggccgtgatcctggaaggggctcgcgccgtaggcaagacgatgatggcccagcgccaactcgtcggcgtcggcttttcgtatgaaacccttgcggatgccaacgcatacgaactggcgaaaaccgatctgcatggatggctggagtccttgaacctaccggtgatcatcgatgaggcgcagcgcatccgcgatctgccgctcgccgtgaaggaaatcgtcgatgcgctgcccgccggccatacgcagttcatcctcaccggcagcgcgctcatcaaccgaggtggattggacggccaggatcctctggcccgtcgagcgcagcgtttcaccatgagccccctgactcaacgtgagatgcacggcgttgacaccagcctggtggacgatttatgggatggagagccggacgtctccttcgacgagccgatcgcccgtcagaagctttacgatctcatggccgccggaggcttccccgaatactcgtcgcaatatgccgaatatgcggattgggaacgggaaagactcgtggcggatgacatccgtgccgtgctcggcgacaccattctgcccgatgagaaacttgacgcggccatcgccgaaaatatcctcacgaggcttctgtgcatgcccggaggcattctgaatgccagtgctttgggtgagcagcttgccctcgaccggcgtaccgtagaccgttatgtgggcatcttcatgcggcggtttctggtgggcgcgttgccgaatctgcgtaccgcgcctaaccgtcagaccttcgcccgtgccaaaatccatccggtggatacgtcgctgagcgtacaaaccatgctttccaagggccgcgatcccatggtcaacccggtggattacggcaatctcctcgagtcgttcgtcgtcaaccagattctgccatctgtgcagtggtcccgcattcatcccgattgcttctattggcgcgaatcaggctccggtcccaaggaggtcgatctcgtcatggtaagccgggatcgcattgtcggcgtcgaggtcaagtcctcctcccgggtaacccgtgaggatttcaaagggctggcggcgttggccaacgaccggcggttttaccggggctaccttgtgtatacgggtggccgcgtgatgaaatggccgggtaatctttgggcattgcctgtggtggcgttatggaatcccgacgcatttatagctgcggcggagtgatgcggggctgacggccttccgcccactccgcatcacgattacccaacttcactcggtacctccctgaatgcgttgctttaggatggactcgatcggctcgtagtggtcgatgacggctttccggtattcctcgacattaccggcgagggccgcgttcaacatgcgcttgtgggcctctgcggtacggtcgagctcgctggacaccggcagacccagttggggaagaaccgccatgtgcacgagccacagggaacggaccatctgcttgacgatcgtgttgtccagagaatcgagaatccccatatggaagtcaatgtccaatgcgaggaaggtcttgccttccttggcggtattggtcatggactcggcaagctccatgagacgcggttgttcgctgccggcaagcgatacgaccacttcgccggcgcatcccaagtccagaaacctgcgcagctctacgacatcctgcaggtctgtgaaattcttgccgacggacaccatggatcggaatgcgagcgtttccaccatcggatccaaggacaaagagcccacgaaggtgcccttgccgtgttccactttgacgatgttgagcgcttcgagcttgcgcacggcctcgcgcacggaggagcgggaggctccgatcgtgtcgcacagctgtgtttcagtgggcatcacgtcgccggattgcaggcgctcgcgcaggatgtaggacttgatcgcgtccatcgtctcgtcacagcgactgcgagcggagactgcgggcgtgaccttcaacgacagtcgggccagcaaagccagttcccgttggctgtactctccctgaggggtgaatgattccgcgtttggtgcttccgttgaagctggcggttcaagtacggccgagtcggataggttgctcatgatgtgctccttgtcttgttcgtcctcaagttggtgacgccgttgtcgtgatcaatgattgtgcagttctcaaacggcttttctgtctacaatagtgcgaaacgaaaaggcttgtctgggtttgggtcgttttttaccatagcgctgactttaccggtattgagcatggtcgaatggtccggttggccgtgacgcgtatggcatgctccgaggttccttgacttgttgttgcgataactccgcattgagtcatcaggcatctgacaacttccatcgtatcatacgcatggtggcggcatgcgggccgttcggtggtcttttcccatgcagagtttcgcatggctgtgggctatctgcggagtgtgcagcagattcgggaagtcgtggataggtgtccgcaaaggcgaaaaagttctgcacactatggagatggcacggccggttgtgcgccgcggccgtcgtaaggagacgacgtcgtgcgaattcgcggggagattcctagtgtcgcacttcacgatctgtattttttgtacatgcgatgtacaaaaaatgcgcaagcgaatgtatcacgcggccgctggttcaggcattccatataccccgacgatcacgtttctatggcggctctggtgtgtaccggccaccacgtcgtggaatggccggaattccgggcgtttcacgactgacattcctcgcgctgccacgttttgcgcgggttccagggccatgttcgtatcgtttttccttgttttccctgtggatttgtcacgttttgcgcgggttttgcacccgctgctgccatgtttttccattttgcggatgcatgcgggttcatgtgggtgcatatggaggcgtgcgggcacttattggcgcttgcgggcggtcgcggctttcaccgcggagcccaccgcggagacggccatgccggcgagcagcgcgagggtggcgaagacgcccggtcggcgcagctggtcgcgcagggtggggccgtccaccaccaggtggtcgccgatgaagacgcgcgcctcattgtggccgtagcgctccacgaggtcgccgtaggtgagcatgcgcgtggcgtaggcggacgggtcggattcgcggaattcgaacaggcggatgccgcgcaggcgcgacttggggccgtacgaggcgaagccgcaggtgggggcgtagccgaggtcgagcccgtccacgtgacccacgaacgcgttcttgtggtcgtggccgcagtagagcgcgaagtagccgcccgcgtcgcgcaatgccgccacctcgccgcagttcacgtccgcgcatccgatcgattcgccgaggatcgaacccggccggcacaccgagcggtccagcacgtagcagcgaccggcgaacgtgcgcgcgccctcgacggcgttgggcgtgaggggcggcacctccttgaggcactggtagaactcctgcggcgggatgtgctggaacgcgatcgcgggcacgggccacccgtcgccgttgcgttcggccagagagcgctgcacgccgccgagccacgccagggcctgcggggtgggcgtgccatagccgtccgagtcggccagatcgagcccgcgcgggtcgcgcgcgtattcggcgggcgcgaggtgcgacgacggctcgccgaatacggtgtcgtcgggggagagtcgctcggtggcgtagtcgcctgaattgaccatcacgacgctcatggccacgcggcccgacccgtcggacgcctcgacgggcagcgcgaacgtgccgggctcgcagacgagcgggttgtcaccgtccgcgccgtgctccccggggtcgcgcgggttgaggcagccggggaactcgcggtagatgccgtcttgttcgccggcgaggatgccgcactggaagtcgtggttgccgtaggtggcggcgaacgggacgcccgcgcgcacgaccggcccgaggaatccggcaaagcaccggcgcaccttggcgcgcgcgtcgtcgagcagcgcgtccacggcgtcgtccggcacctcggacgcgggcggatcgggcagccgcgccccgtcgaatgtgcggcgccaccacgcctcgaaccgcgtcacctcacgcacgtggtctccgggccgctccccgcgccggcgcaggaacgtgcgcatccacgccggatcgtacccgcggatctgatcgccggtgaacaccaccagatcgggtttggcctcgcggatcgccgcctcgatgagcgccacggtgttcggatccacgtccggcccgtcctgcacgtccgccatctgcagcacccggaaggtgccgtccccatgtccgtccccacggaagcgcaaagtcgtcatacggcccactctaacccatccgcaatccaaccgcccggtatggcgattgggatctgtgacgccggcacgccgccgcgtaaccgctatgtggcatgggcgcggcgttgggatgctggaacggtacgatggaagttcgttacggatatgtaacgcagtgatagaggagcgcgtcgactgcccggcattcccgccggccgaaggggcgcgccgattccaagcaaaggaggagtaatgggtcaggatcaatcgtccgtgtttgatctcgcggccgtggccgcggcgtccaatggggggaacaacgacccgctgctgcctccggcacgattcatcggcgatccgcagaagcccagccgtatgccgtacaacaagtacgcctcatacagcgagcagatcccgtttgattacccggagcgcacgtggccgggtaagcgactgcagcgcgcaccgcgctggtgctccgtcgatcttcgcgacggcaaccaggccctcgtcaacccgatggattccgagcgcaagctgcgcttctggaacctgctcgtctccatgggattcaaggagatcgaggtgggcttcccgtccgcatccgagactgatttcgacttcatccgcatgctcatcgagcgcgagctcatcccggacgatgtgactatcgtggtgctcacccagtgccgcgagcacctcatccgccgcacctacgaggcgctgaagggtgccaagcgcgccatcgtgcacttctacaactccgtctctgtgctgcagcgcgaagtggtgttcaagaagaacaaggaagagatcaagaagctcgccaccgatgccgccgaactatgcaaggacctcgaatccgaggccaagggcatcgacctgtactacgagtactcgccggaatccttcaccggaaccgagccggagtacgccgttgaggtgtgcaacgccgtgatcggcgtcatcaagccgactcccgagcatccgatgatcatcaatctgcccgccaccgtggaaatgaccacgccgaacgtgttcgccgacgaagtggagtacgtctccacccacctcgacgaccgcgattccgtggtgctctccctccacccgcacaacgacgaaggcatgggcgtggccgccaccgagctggccgtgctggccggcgccgaccgcgtggaaggctgcctgctgggcaacggtgagcgcaccggcaacgttgacctggtcacgctgggcctcaactggctcacccagggcatcgacccgcagctcgacctgtccaacgtacctgagatccgcaagacggttgagtactgcaaccagatcaagatctccgagcgccatccgtacgccggcaacttcgtgttcaccgcgttctctggctcgcatcaggacgccatcaagaagggtctcgaggcccgtcaggtggccgccgagcgcgctggcgccgatctcgacagcttcgtctggctcgtgccctacctgccgatcgacccgaaggatatcggtcgcacgtacgaggccatcatccgcgtcaactcgcagtccggcaagggcggcatggcatacctgctcaagaccaaccacaaccttgacctgccgaagcgtctgcagatcgaattcgacaagatcgtccagaacttcgccgacaccaccaagaaggaagtcaaggacgaggacatctggcgcttgttcaaggatgagtacctgccggtcgaacagtccggcatgaccgccgccggcgtggttgtgggcgatacccacgacgcttcgcttgcgccttggggccgcctgaagctgctcaaggtgtccgtcagctccggtgaggacggttccgacaccgtgctcaaggctcgcctgctcgaccgcggcgtgaacgttgggggcgagcagcccgtggagcgcgaggtgtccggcatcggcaacggtccgatcgccgccttcctcaacgccatctccaacttcggtgtggacgcttcgattatggactatgtggagcacaccatgtccgtgggtaccgacgccatggccgcctcctatgtggaatgccaggtcggtgaggctgacgacgcgcagatcgtgtggggcgtgggcattgactcgtccattaccaccagcgcgctgaaggcgattatctccgccatcaaccgttcccagcgcaaccgctgaggccgctgagtcgcacatatagtattggctcccctctctgaggggagccaatactattgggtctctccctcagtcagcttcgctgacggctccctcatcagagggagccgttgctgccatcagagggagctgtgctgcggctcttactgctgctgggattgcggctgctgcgggtcgggcttgggcttctgctcgccgtcgggagtggtggtcgtgtcgccggtgttgccgtccccgccactgctggtacccggataattcgggcattcggtggaatagctcgggttggcaaggcactgctgggcgaattcctgcttctgctgggcctcggcatcagcctgcttcttggcttcttcctcggccttccgcttggcttcttcctcggcctgcttcttggcctcttcgtcatcggtggtggaagaagaggatctctggccgccgcccaagccccacgtgccgtcggagccaccaatcttgccgctgtccttaggcgtggtgaactgctcaacggcggtaccctgcagcgcctgagtcatgtattcctcgaataggtgcgccgggtagccggtggaggtgacgccgtagccgccgaatgccggcacaacctgcgggttgccgtccgcatccggattccaaatggcccatacgttcaacaggctgggcgtgtaacccacgaacgatgccgccagctcatcgttggcggtaccggacttgccggccacttggcggccgcccagcgcgctggacacgccagcggcggtgccgtaggtggtggtgccctgcatggccttctgcaccagcgcgcaatcgttggcgtcgaacacctgcttgttctcgttaggtgcgttgtagaggtccttgttgtcggagctcagcaccttgttcaccatgtgcagggtgttcttcacgccattgttggcgatggtcgaatgcccctgcgccagatcccacacggtcagcgcgttgatgcccagcacgttgtacatggagctggtgtcgatctctccctcgatgcccgcttcatgcgcgattttcgccgtgcgctgcggcgtaaggtgttcgttgacgttcatgaacaccgtgttcaccgagttggcggtggcctggtacaggttgatgttgccccagttgatgttcagggcgttgttgacctcggcggtgatgccggagaaatgctgatgcgagttgccattgaacatcgtgtcgaagttcacgccggactgcgcggcacccagcagcgcgaacggcttcatcgtggaacccggctcgaacatggcctgatcggcgttgttgagctgctgtgtgaggtaatccgagccggcgtagaccgagaccacggcgccggtcttctgttccacggcgatgccgcccacctgaatgctctccggcatgccgtccgcgcgcgtgtctcccacggactgcatcgcatcctgcttggccttgtcaatggtggtaacgatcttatatccgccggtgtcaagatcttccttggtgaacgtcttggaagccaccagctcacgccgcaccatatccaacaggtatccgttggggccggcgtattcgttctgctgcgtcacgtcggcggtctgcgggaattcggcggccttgtgatccttggcggtgatgtagccgtcttcctgcatgatgttcagcacgcgcttgaatcgggccttggccatatcggggttgtcggccggatcccacgtagagggggaggggatgatgccggcgatcatcgcggcttcagacagcgtcagatccttggcgtccttgttgaaatacgacttggcggcggcctggatgccgtaggaattgcggcctaggtaaatcgtattcatgtagttgcacagcacttcatccttggattcggtctgcgcgattttgatggccatgatggcctcgcgggccttgcccacgtaggaggtggtttcgcccatgtagtagcgttcggcatactgctgggtgatggtcgagccgccctgacgggtgcccttggtcacgttgttgatgaacgcgcgggcgatgcccttgagatccaggcctttatccgtatagaatgtgcggttctcggaggccacgatggcgttgcccacatagtccggcagcccctcgcaagagatgatctcgcggttctgctcggcgtatgagccaatcggcgtggtgccgtcggcgtaatagacggtggtcttctccgccaaggcgaacttctcgggctggggcacctcggtggtggcatacaggtatgcgaacacgccgataccgattgccaagccaagtccgataaggccaaagaatatgcccaatacccacttgagcacacggtggccgccattccttttatggctggatgcgcgatgggtattggccggcttgcggctcgtgttgttcttgccgcgagggccgcggggagagcttgctttcgtggtgcctgcagtctcgctctgcgtggcgcgaggcttacggagcgcggggccgcggtctgacgaatgtgcgcgacgtttatatgaagccatgattccaccgtaactgctggccttgaacaaacgtttgacgtgagcgctctcagggcgaacaccaagcgcgattttcccggaactcttacaattgggcactattctgcggcttgcatggatattggctgaaagccgtgggcgcagcgccggccggcacgcggcaatgcctaataaaaagggcttcccgtcgctcgtccacccattttcttaagcttgtcacagcctccgcgtggcggtatgtcacccaactcccccagggcaggaatgcagcaagggtaagtggcctctgccgggtacgtggaggtttttcttttgtgcggatttggccctgagcgcgcggcgatgcgatgcactgtccggggcgcggccgtacagtcgtgaatatgaatgacgcacagaatcctgtaattcgtgatccgcatgcgccggccagtatggtgggaggcgcctctgatgcgcgctccgccgccgataatgcaagtgacccgttcgccgcgctgggatcgggctccgctgcggcaggcacgtccccaaacgtcatcgatccgctggctgggttcggctcgccggctcgcgaaccgtcacttgggcttgatgatctcgatccgcttgattccggcgaggtcgaccgtggactggccaagctcgacccgttggctgtgcgcccgcgtatttccagtcgcgtgctgtgcgccgtgttcggtctgctgctgatcgcggcgggattcggcatttggtgggtgtgcgtgttcaccgaagacggccagtcgtatgacgaactggtgtggaagaacctcgtgaccgtcgtgcccggcgcggtcggcggcctgatgtcgctcgtcgcccaatcatggctggtcatcgccatcagttgtctgcttgcggtgattggcgtcgtctcggcattggtgcgtcgtcgttggtggctcgtcgggcagatcgtcgtgttcgccgcggtgtgcctggccgtcacccgaatcaaaggggtgctgccgcgtccgttcatcatcaatactgattctcccgcagccaattccgcgccttccgggcacacgatgctggccgccgcctgtgcggtgattctgctgctcgccgtgcctcgtgcggcacgtgcgctggcgggcattatcggcgtgatttggtcttggaccgtcggcgtatccgtgatatacggccaatggcaccgcccctcggacgtggcgatgtcaatactgctggtggccggtctagcgctgatcgtactggtcttcacccggacgtccggcatggacgagccgggcagccgcgtctcttccgtaagcgtgcagatcgttggtagcgtgctgatcaccggcggcctcctactgctggcatatagcgcatacgtgatctggcaggtggttccgggcctgaatatcagtgcgagctgggcggtgtcgggttcgatcgtcagcgccatcgtgggcgttgccggcgttgccgcgctcaccttcggcctgctgctggctttgcggcacatcactgccgcaccgctgagtcgattgggcctcattggcgcgcctccagcgcctccaaaacggtgatttatggcgcgttgtggccgtaaatttggcagttgaccatgagtcgtgagtattatgacgccagaaacaccgcgcgtttcacacaatgaataaggagtagggcatggctaccaagctcgtgattgtggagtccccgaccaaggcccacaaaatcggtgactatctgggcaagggatacaccgtcatggcatcggtcggccatattcgcgaccttgcgcaacccagccaggtgcccgcggccgataaacccaagttcggcaagttcggcgtggacgtcaacgatgggttcaagccctactacatcgtggacggcgataagaagcgcacggtaagcgagctgaaatccgccctgaagggcgccgacgagctctatctggcgactgatgaggatcgcgagggcgaggccatcgcatggcatctggtgcagacgctcaagcccaaggtgccggtcagacgcatggtgttccacgagatcaccaaggacgccatcaacgcctcgctgagcaagacgcgcgatgtcgacagccatatggtcgacgctcaggagacccgccgtattctcgaccgactctacggctatgagctgtccccagtgctgtggcgcaaggtggggccgggcctgtccgccggccgcgtgcagtccgtggccacccgactgattgtggagcgcgagcgcgagcgtatggcgttcaagcgtgcaccttactgggatgtcgtcgccacgctggccgcgcctgacgctttgggcgagcgcaccgagttcgcggcccgcatgatctcgttgggcggcaagcgactcgccggatccaaggacttcggctcggatggccagctgactcccgatggttttgcgggcagcgttcgccagcttgatgaggcttcagccaccgccgtggccgaagcgctgaagaatgccgacttcaccgtgatgtcgatggagaccaagccgtaccgccgccgcccgcagccgccgttcaccacctccaccctgcagcagaccgcgggaaatcgcctcgggatggggtctcgcgcagtgatgcgtgcagcacagagcttgtacgagaacggctacatcacatacatgcgaaccgattcggtgacgctttcgcaggaggccatcaccgccgcccgcaacgccgtctcctaccatttcggcgacaagttcctctccgccgagcccaagcagtacgccaccaagaccgctggcgcgcaggaagcccacgagtgtattcgcccggcgggatcccgattccatgaccccgatgagctggcctccaagctgcccattgaccaactgcgcctgtacacgctgatctggcagcgcacgctggcatgccagatggccgacgccaccggatcgaccgccaccgtgcgcctgtctgcgccggctggccccgccgatggtgaggctgtattccaggcatccggcacagtcatcgaatttcctggctttatgaaggccaccggcgagggccgcaagaccaaacccgccgcagccgacgcggcggccgccgataagtcgggtgccaaggcgaccaagtccgatgcctccgaatccaatgcttccctaccgccgatggaggtgggccagcgggtcgaggcttccgacatcgagccggatggccacgaaacccagcctccggctcgatacaccgaagccacgctggtcaagacgttggaagccaaggaaatcggccgcccgtccacctatgccagcatcatctccacgattatggatcgcggctatgtgtatgagcgtggccgtgcgctgatccccagctggctggcattctccgtgatcaagctgctggaaacgaacttccccaagctggtcgattacacgttcaccgctgagatggaaaacggcctcgatcgcattgctcacggcgaggagactggccgggattggctgacccacttctactttggctccggcgagggcgcggcccgcaatgccgacgaagcgcatgaaggcctgcagcagcaggtggcacagcttggcgagatcgacgcccgagccatcaacaccattgacatcggcgacggcctgcatgtgcgcgttggccggtacggcccgtatctggaagatatggagcatctggatgccgaaggcaacccgaagcgtgcctccctgccggacaccatcgcgccggacgagctgaccgtcgaagtggctcatgatctgaccgacaaccattccggtggcccgcgcgagctgggcaaggacccggtttccggcggcaccgtggaagtgcgcaacggtcggttcgggccgtatgtggcgttggtgccgcctgagggtgccgccgattccgccgccgctgcgccggccggcaagaagagctccaagaaggccgcggccgctgcgtcgcgtccgaggatggcctcgctgttcaagaccatgagccccgaatcgctctcgttggaagatgcgttgaagctgctgagcctgccgcgcgaggtgggtaagtacgaggaaaccaacgccgagaccggtgaggtttccgaatgcacggtggccgccaacaacggtcgctatggtccgtatctgaccaagatgagcgccgatggcaggtcggatacccgttcgttgggctccgaagatgagatcttcaccgtggacattgacaaggccaaggagctgttcgcccagcccaagtacgggcgtggtcgcggacgtggcgccgccaagccgccgctgcgtgatttgggcaacgacccgaacaccggcaagcatgtgaccatcaaggatggccgctttggcgcttacatcaccgatggcgagaccaaccgcacggtgccgcgccaatacacgccggagtcgattgcgccggaggatgcgttccgtctgcttgccgaaaagcgcgcggctgggccctccacccgtggccgccgcggccgtgagcgtgccggtgccgcgaagtcgggagccaggggagccaagaagggcgctgcttcggctgcgaccaatgccgccgaggccaagcgcgccagacgccgtgccgaggtgaagaagctggcgaacaagggctggtccaaccagcgcatcgccgaaaagctcagctccaccgccgccaccgtgaagaaggatgtcgactggctgaccgccaacgagggctacgaacgccccgccgtgatccccaagcgtggttgagtggaattattgctctacttgcgtttcaaggggctgatttctcgttttgagaatatctacttccgtttcaaggggctggtcatctgctgaaccacgagtatgaacggctccgcgccaacgtcattccgccgttttggaacgttgtctacttggacaacagccccttgaaacggaagtagacctccgggaaaggcctaatcagccccttgaaacaggaatagacgttctttaaagcaaaaatcagccactccgaacggagaagggcccgtgaatcggggcagtggccgcaactctgcgcctaacgctaaggtcgatagcatgagcggtctgtttgtttcatttgaaggcgtcgatggcgtgggcaagaccacgcaggtcgagcggctgcgtgcgtatcttgaggctcaagggcgcacggtagtcgtcacccgcgagccgggaggcactgcgttaggcaaggccgttcgccagttgctgttgcacggcgtgaacgagggtgccgccgacatcgcgccacgcgccgaggcgctgctgttcgccgcagaccgcgcgcagcacgtcgccgaaaccattcgtccggcgctggaacgcggcgaagtggtcattaccgaccgctatctcgattcgtccctggcctatcaggccggtggtcgcgaacttacgtcagaagagattcgatccttaagcatgtgggccaccaacaacttgctgccggaccgcacgtatctgctggacatggatccggcgctctcccacaaccgtcttgaacatgccgaagaccgtatggaatcggccggcgatgacttccagtcccgcacccgccaggcgttccttgatttggccgcggtcgaaccgaatcgtttccgcctcatcgatgccagccagtccatcgagcaggtgtgggccgccatcgaagcggatatcaaggagctggcatgagcgtatgggattcgttggtaggccagcagccggtaatcgacatgctcagccgcatcgcgcagggggacccgagccagatcgcccagtcgtggctgatttgcggccctcccggctccgggcgttccaacatggcccgtgcgttcgcggcggcgctggaaagccccgaccatggcatgagcgatgagcccacgcgcgtcacacagcaggtactcgccggcacccacccggatgtcacagtgctggccaccaacaaagtgaccatcggcatcgaccaggtgcgcgagatcatcaccacctccgagcaaatgccggccacagcaccatggcgcatcatcgtcattgaggatgtggaccgcatgctggagcgcaccaccaacgtgctgctgaaggagatcgaagagccggccgaacactgcatctggctgctatgcgcgccgagcgcccaggacgtgctgcccaccatccgctcgcgcacgcgcattgtgaatctcgccgtgccctccgcctcggcagtggccggattcctgactgccaccacgggcgtcgagccgaaagtcgcccagcgggcggcccgtctggccgagggacacatcggcatcgccaagttgtacgccactgacgagcaggtgatgacggatcgcgacgaattggtggtgggcgtactgaacctcgctcgcgcctcggacgcggtgctgctggccggcaacctcatcgacaacgccaaggcccaggccgagactgacgcaagccgggtcgcagccgatcaagaggcggaatttcgccgtatcaacggtcttgagccgggggagcggattccgccgaaactgcgcggcgcgttcaatcagatcgccaagaaggacgatttgaagcggctgaccacacgacgcacgcgcgatgtgctggaccgcgcgctcaactccatcgcctccatttaccgtgatgtggcggtcctgcagaacaatgcggaggattcggtcgggcttatcaacctggagaatcggtcggccatcaccgagctgtccgtgcggctgaaccgcgccggcgcggtggcccgactggacgaagtggctcacgcccgcaagcgacttgccggtaatggcaatccgctgctggtgtttgaatcgctcttttgcgcgttgattccgtgagattgcgcccttggcgctagcgcaggtgaggtgccgacgcagtatgagatggcgcttgcgatgcgccctgatgtttgtgcgcttggcggtgtaatgcagcacagtgtggttccggcgcaatgcaaggcggccgtaatgagggccgcccaatttattcggcgtcttgcgatcctggagtgataagccgcgaaggcagattgacatgcaccggtgtattggattgatcggcgagcagccgcagtatctcgtcggcgatctgctgcagcgctggctgaatcggagcggggtcggacgtgaacgtggtgtgctgcaaccctccgatttgcacggcgggaatctcctgcgcatactgcgccagcacgtcgcccagatcaatgccaggcagtggtacgacaatcagcccatccacatggcgcgccgccatcaacacgatgcgttccttctgcacttccggcgttcgtccgacactcagcgccagctgccggccgctctggttgaccaacggctcaagcgtgtcgatgagccgtgcgctgaacggatcctgaacgctcggcacaatcaggccgatggttctcgtcacggtggaacgcagcgcgctggccgcaaaattcaccgaatagttgaggctgtgggccgcggctcgcacgcggcgggcgatgtcgtcgtccttggtgcgtttgccggaaagcacacgggacaccgtggccgtggagacgttggcgatggcggcaacattgacgattgaggcggatggtgattccgctgtctcgttcgtggtcatgtgtgcctcctctcccagaaagcatgccggctcggtgaaattaccggcaatcactatggaacaaaagacggccgcccggacaggcggggcggccgtttggcaagtgagagaagtttcgcccgtttactcggcggcgagcagggtctcggtcagggagtcggcaacggtctcggcgttgtctccctcaacggtgatctgcacggtgtcgccctgctgaacgcccagtcccatgatggacagaatcgagccggcggggacggctgcgccgccttccttggcgatggtgacgttgcagccggaggccgccacggcctgagcaaactgtgctgcaggacgagcgtgaatgccgacggggtcagtgatggtgatgttgcgggtaaccataaggacactcctttgcgtctgtctgaaatggaagttatgcggccaattgcggcagctgcttgatatcgagtataccgagacgtagaataaaatccagaaaacgattaccgttggcgtgttgcagataataaaccaccataataagggaactaacaaagaagaacttgccggcaatggctgcggctgcatactccgaagtaggcatcgaggccactgctccaaagaactactaccctacgaacaaaggagaaccattatggaaatcaagggtgttggcattggccgcggcgtggcggtcggctcggttattcgtatggcggccccgctgccggagccttccgacgcgccccgagccgataccgtgccggcgcagaaagagatcgaccgcgtcactaagtcgctggccgtagtgaatgccgacctgagccgtcgtgccgaagaagcggctaacggcgacgaaggcgccaagaaggccgccccgattctgcaggccatctccatgttcgcgtccgacccctcgctggcggccagcatcacctcgctgatcaacggcggtaagaccgcagagcgcgccgtgctggaaggcttcgccgcagttgaggatatgttccgcgccatcggcggataccaggccgagcgtgccgccgatctgcacgatgtgggccagcgcgtgatcgccgacctgatgggcgtgcctgctcccggcattccggaaagcgagaccccgttcgtgctggtggccgaggatctttcccccgcggacaccgccgcaatcgacctgaacaaggtgctggccatcgtcacttcgcagggcggccccacctcgcacaccgccattctggcccgcgctcgcggcatcgtggccgtggtttccgccgccgaagccgaggatctgaccaatggtgagcaggtcatcgtcaacgccgccaagggcgtggtggttgccaacccgaccgctgctgagatcgaggatgccgaggccgccaaggctcacgccgccaaggccaaggagctgcgcggcaagccgggcgccaccaaggacggccaccacattccgctgctcgccaacgtgggcaagcccgccgacgccgatccggcccttgagtatggtgccgaaggcgtgggcctgttccgttccgagttcctgtttatcggcaactccgagccgccgagtgtggaagagcagaccaaggcctacgccgagctgctgagccgcttccccggcaagaaggtcgtgattcgtatgctggacgccggcgcagataaaccgctgccgttcctcaccccggaagacgagccgaaccccgccctcggcctgcgtggtctgcgcacgctgaaggctcacatgaacgtgctcgaaggccagctcaaggcgctcgccgccgccgatgcccagaccgaggccgacctgtgggtcatggccccgatggtcgctgacgagcatgaggccgattacttcgtcaagctcggcaagtcctttggtctgaagaaggtcggtgtgatggccgaggtgccgtccatcgcgcttatggcagacaaggtggccgaggtggccgacttcgtttcgatcggcaccaacgatctgacccagtacacgctggccgccgaccgtacgctcggctcggtcgccaactaccagaccgcatggcacccggcggtgctgcgcgccatcaagctcatcgccgacgccggcaacgcgcacggcatgccggtgggcgtgtgcggtgaggctgccgccgatccggatttggccgtggtgcttgcaggcatcggcgtcaactcgctgtccatgaccccggtggctctggacgatgtgcgcgccgagctcgccaactggacgctggaggaagcgcaggagaaggccgccaaggccctcaacggcgacttctacactccggccgagtgaccgtggccgagcaatcggctaaataatcgggaaaatgccttgttttctatctctttgaggataggaagcaaggcattttcggtattccagggcttcccttccgtcgaggggaggccctcagtcgtgtttggctatcaccatgtattgtgatggtgttttttagttgccgcagactgaaatctgcaacatggctcgcgatacactggtggatatgaagatttccgccgatttcaccgtcattccggacgatttcgccaaggccgcggcccctgaatatttcaatggtggcgtgcctgtggtctccttcccgttctacatcgatgatgtgaaccccgaagctcgttacctgcactgggagttcgtggatccggattcgattccggtctgcggtttcgagtggattcactggtccgtggccaacctgcccatcggcgcgctgatgtacgacttcaacgactcacatgctctggccattccgccggacttctcccgccagctgccagccatgattccggagaccgtgcaggggcgcaactcctcggcctccaagttcctgggtcgtagcactgacccgtcggtgattatgcggtacaacggaccgcagccgccggacaaggatcatgagtattatctgcaggtgtgggccaccaagaagccgcttcccggattgaatcagggattctggctcaacgaactgctgcacgcgctgcgtgccagcggcgagacgcccgacaccgacggcatcttcctgaccggcaaggcatgagccacatgagccccgcaggcgggggctgtcagcatcactgactgggggtgggtcagtacaaaacctccttcagtccgacttcgtcgttcagcttccgccagcgggagcgtgaccacaacaaagaaaggacaccatcacactatggcctgcaccacgattctggtaggcaaagacgcgagctacgacggctcgaccatcatcgcccgcaacgaggattccgcgaacggcgagttcaatcccaagcgattcatcgtcgtcaaaccaagtgaacagccgcgtgagtataagtcggtgatctctcacctgactatcaccctgccggacgacccgctgcagtacaccgccgtgccgaatgcggacctgaaggaaggtatttggggcgaggccggcgtcaacgaggcgaacgtggcgatgagcgccaccgaaaccctgaccaccaacgagcgcgtgctcggcgccgacccgttcgtggaatatgtgccggccaagggcaacgagcccgaggttcccggcggcatcggtgaagaggacttcctgaccatcgtgctgccgtacgtcaagaccgcgcgcgagggcgtggcccgcctcggctcactgctcgaggagttcggcacttacgagatgaacggcgtcgccttctccgattccaacgagatctggtggctggaaaccgtgggcggccatcattggatcgccaagcgcgtgccggacgaggcctacgtgaccatgccgaaccagctcggtatcgacgaattcgaccttgaggacgctttgggcgagcagaacgagcacatgtgttccgccgacttggccgaattcatcgagaccaaccatctcgacctcgccgtggagaacaccacgccgttcaacccgcgcgacgccttcggctcccattccgactccgaccacgtgtacaacaccccgcgcgcctggtacatgcagcgcttcctcaacccgtatgacgaggtgtgggacggcccggacgccgatcaccagcccacttccgatgacatcccgtgggctcgccagcctgagcgcaaggtgaccatcgaggacatcaagtacgtgctgagctcgcactatcagggcacgccgttcgacccgtatggtcagcttggtgatgagcgcacacgccacatgtaccgtccgatcggcatcaaccgccaaagccagctcgcggtgatgcagattcgcccgtaccgtccgcaggcctcccgcgccgtgcagtggatcgcttacggttccaacccgttcaatacgctggtgccgttcttcccgaacgtggatgtgacgccggcctacctcgaagacaccaccacccgcgtgacctccgagaacttctactgggtcaaccgcatcatcgccgccctgtgcgacggtgccttccgatccacctccaacgccgtcgagcgttaccaggagaagaccggtgcgatgggtcaccgtctggtggccgccaccgatgagcagattgcgcgccttggcctgaccgcggccgaggaagccgcccagtccgccgcggaggaggagttcgaggccgacaacgtggatggtgacgtgcagccgatggagccggatgagatcatcgccgcactgcgcaaccccgaggtgcgcgagatccttgccgccgccaaccagaccatggccgaccagctcaaggaagaaaccgacaagctgcttgactccgtgctgtacactcgcagcatggaaatgaagaacggcttccacatgtccgacttttagtcttgacttgcctcccgctgtgggaggctgagtcgttaagaaaacagcccagtgggctgtttttaggcgaaggggcggcgacagccgccccaccacacacagaaaggctttatatgaccactatcgaagacttcaccagccagtacggcttggtcgagaaaatcgacgcattcggctacctgaagtacctggccgagaaccccgacgctccgcgcaagcacggcaaggtgatccttgtcaccgccgatacgccgctcaaggcctcgcgcggtgagggcaagaccaccacgaccatcgcccttattgacgccctgaacaagcgcggcatcgacgcggccgccgtgctgcgccagccgagcatgggcatcactgcagccggttccaagggcggtgcctccggtggcggcaaggcctccctgacccaccccgagctcatcgactggggtctgtgcggtgagatgggcgccatcgaggcggcccagaacttgctcgtctcctttgctgagaaggccgtggatgagggcaagctcgacacggttctcgtgccacgcgtctccgaagtgccgagccgttccctgcgttccatcgctgtggattacggcaagggcaacgtggcggagaagacggtgctcacccccacctccgagctcatgcagattgtggtgctctcccgttccatggacgagattgccgagcgcgtgtccaagatgatcgccggcaccaaggatggccaggccgtgaccttcggcgagttcgtggacctgtggcgcatcaccggcattctggccgatgcggtcaagcccgccaagaccgagaccgtgaacggttccccggtgtacgtgcacggcggcccgtttgccaacgtgtccatcggcattccgacgttggtctccgtggagatggcttgcgccctgcatgatgtggtcgtcgttgaggccggttacggcaccgacgccggcgcccagaagtggctggatatcgcgtgccgcgaattcggtgcgcagtggccgtccgccgcgattgtggtgactcgtgcctccacctggcgcgatgatcccgagctggcctggcgctacccgttccacgtgcagcgcctggagaacctggacattccgaccttcccgctcatcaacctgtgggaaggcgaggacgatcaggttccgtccctgaaggccaccgccgacgagctgggcttccgcacgccgatcatcggcaacctgttccgcgatggcggcgaggcgctggctccgcagcttgatggttttgtcgatgcgcttgagaacggctccatgccggctgagccgcactcgcataagggcatggccctgacggagaacgccaagtgggtagccgagaacgcctatggtgttccggccgatcgcgtgatctacaagccgggcttcaccgagtccgcggccgaggccatggaactgtgccagtctgctggtatctcgctggatgatttggccttcgtggcggtcaagtcccctgcgaccatgaccgacaacgaccgcgctccggaggccgagcgcaccgtgaccctgaagaaggtcgaagtgcacgccggcgccggtctggtccacgtcaacctgaccaccagcctcaccacccccatgcccaagatcgtgtgattgagcttgaaccgcagtaacttgccttcgaggggctgatttccggttttccggaggtctatctgcgtttcgaggggctcttcgattgcgaaacccggagtatgaccgttgcaatttcaatggtcatactccgggtttcttgtattagcagccccttgaagcgctagtagagtttctgaatgttggaaatcagccccttgaaatgcagaaagcccgccagcggcgggcttttcatgtctcgaatcctcgctttgaggttgagacgttaagcaaacagcctggtggggctgtttgtagcagaaaggcaaacgacagtgagccagtaatctgcggacgagttggcagtgaagctgactgggggggggagtgccatggcaaaccactccccctcagtctcactgcgttcgacaactccccctccgggggcaagatataacaactagaagttgccgccgttccagccccagtcggtggtggcggtgtaacggatgtaagtgcggtcctcggggacgccaagcgtagagttcaatgcggccatgatgtcttgtgtcagcttctcccaggcagagctcggcacggaacggccaaacacgttgacctccacgtaggcggccggctggtcgtcgctgccgccaaagtaaatcggcatattgtcctcaaacgggcacatcagccagccctcggacttgcccggcacagcggtgattgccctgccatatgcggccttcagtgcctcgcgctgctcaggcgtggtggatacggacacgtgagtgtgaataacaggcatggattcctccttgatttggttcgtctccagtctatctttggtgcccgtcgttatgcactgccttgatttcctccataagattgcctgcacctcgtatcggttccatgttgcttatgattggatctcctctctgaggggggggggagcatctccaattgcggagattattggactttctggccaattcgcaccccacggtcagaccaatagtgttgaataccctctgtgagaaaactgattgaacagctgatgaagttcggcattgtaggcgttatcgcctttgtgattgactggggtatcctcaacctgctggtgggcgtattccacatgcacaacgtgttggctgccaccatctctttcatcatctccctgattttcaactatctggcgagtatgaagttcgtgttcaagcatcgtgacgatatggcgcgatggatggagatcgttatcttcgtggcgggtgccgtagtcggtctgttcatgaacgacgccatcatctggatttccacctacggtatgaaccacgacgctttcgtctcgcagcacgccgaatacctgctgcgcaccaacgtgggcaagctggtggccaccgccgtggtgatggtgtggaacttcctgattcgtaaatggctgcttgacgatatacacaccaacgcgatgaatcgtctgaagtccgccgaaaaccgtctgaccgccgaggagctggaagccaagtggcagagcagcttctctcataagcttggcgagtggtccttggagcacacccccaaaggctggccgaagtaaggcgtattttcgtctctttccgtggttcaactgctaatgggcggtgataagccacatctcagcgtcagaatttcaggaaaagaatggcttcgtcctgaaattctgacgctgagtcgttgttatcgtcggtattttaggaaatcacccctaatttcctagatttctgtcgctgctggtagttagggtgttactgggagctgatgaaactgattgggattgggattgggatgaaatcatctcaatcgtcagaggggacttggctatatgtcacacactcacttcggtgagtgttggctgttcggtggagcccttgatctgcttgaagccgattaaggcaatcaccagcgaagccaaggccaaagtggtgaccaccatgaagccgccgtgcgaacccatgcggtcgatgaactggccggcaatggccgacccggcagaggagccgatggaattcatcgcgcccatccacgccataccctcggtcaaacgcgagggcggcaccaagtgcagcatgagctggttgccattaatccacgttggagcctgacagacaccgatgatcaggtagatgatcatgatgacccacaaatgcttggcgaacaggaacgtgctgataccgatgttcaccacggccaggcagaagtagaaacgcttccatagggcaatcgaccagtttttcgcgccgtacaccagagcacccatcagcgagctgatggagaagcaggcgaacacaaagcccgtgtactgcttcatgttcgactcggtggcaaacgcgataatggaaataccggtggccgactggaacgcgcccaatccaaaccatgtgacgcacacggcaatcaagcccggcccccagatggacgccttcttgccggaacgcgcgtcggcaaccgcctgggtgatctccttgtcgatcacggtttggtcggttacgccttcgcgctcaagacgacgacgggtttcttcggccgcggtctccgctttcaatgcttcggctcgagcggcctcgcgctcgcggtattccttacgggaaataccctcagcccgtgccaatgcagtctgcgacggcggctcggtggtcagctcggtgaggaacatcagcgcgcccaccaccacgcacatgccggtgaacgagaaagccagcagaccggaaatcacggccagcgtggatgccagcggattgccgatcacccacatgcactcgtccagcacgccgcacagagaaagcgctcggttggtgcgctcctgatcacccttcaagattttggtccaacgcgcgcggctcatcgcgccccacggcgggatggcagccaggaacggcgtcaggcagtacagcacccattccggcgcccgattggtgatcgccgtggtcagcgcgatggcggccacgatccacacgatgatcgtcggaatcgaaacctgccgctggccgaacttatcggtgagcttgccgagcagtggcgtggagatggccagtgcgatcgcctggatggcggtgagcatgccggccagtgaatagttgccgtagtaatgctgtacggaaatggtgatggtcatgccgaccatcgggaacggcatgcaggcgatgaccgagccaatcgaatagcgggcggtgtggggaatgcgcagcaactccgcatatccaccaaaaactttgtggcctacttccttgatgccggccataacggtattcgtgttcgagttggacgagttattggacataacagcactacgctcctttccgctcccgattggatgtcccccgctggcgtggcgttgccagtgaagccctcatcgaatgatgtgttgtccatggtcgcgcaaagtttgcgtcgcgtgttccacgcgcatatttgcgtcacggacaatttaatcgtttgatggggtgcgacacgcggtagattggagatatcagaacaacgttttcacgcccattggggcaaggaccagaaagacggctcatgagcgcaaccaccattcatttcgtccggcacggcaaggtgtacaaccccgaccatctgctctatgagcgtctccccgatttccatctttccgatcttggccggcgcatggcccaggccactgccgcctatctggccaagaacccccaaaccaacacgattgccgccgtgtattcatcgccgctcgaccgcacacgtgagaccgccggcgcgattctcgatgccctgaactcggtgcgcgaagctcgcggcgaagctccgctcaccctcgccaccgatgaacgggtgattgaagcgggtaacgagttccgcggcaagcggatcggccatggcgagggtgccttgtggaagaacggtaactggaagctcgtcaccaacctgtacaagcccagctggggcgagtcataccagcacatcgcccagcgcatggatgacttcgcgcgcgagaaggtcgcccagcaccccggcgagcagatcgtggtggtcagccacgagtcgccgattttcagctaccgacactatctggagactggccacccggagcactggatgttcctgcgccacacggcgcttgcctccgtgacctcggtgacgtacgacaacgaaaccggccgtgtgatgtcaatcacgtatgttgacccagcggccaacgtcaagtaacggcagactggtgtcatacaaccttggcttccttctctgagactgagccgtgaagcaaacagtccagtggactgtttgtaggcgagctattgaggcgcgggcgtagcccgtccacaattgctgtcgagttggctcgcgaagcgagactgaggagagcctgagtcgcgcaaccgaacttctctcagacggcttcgccgccagctcccctcgaggagggagccaagtaagcgcgtacaatcgagtggtggacgcaaaggagcacggatgactatcgaactgaatcgtgaggcaatcgcgcaggtcgcagcattgccggcggtggccaaggccgctgaagtgggctcgaggctgattgctttatggccgttgatcgaggctatgcagatggacaacgacgccaagtatgcggagaatctgcaggtgcgcatcacccgtgcgttcgcgcgaattctgaccggtgaagacgtcactgtgccggacgctgagttcgtctatgagggcgccgatgagattcccggccgcccgcagaatatcgtcgacgccctactcgctgccaatgacgcctacgatacgatgaccggttacgccgaatccggcgatgcagagctgattatcgaggcggccaacgccttgggtattgattgggattccgaaacggcggaatcggtgaaggaagcgatcgccgctgtggaagcacaggttgaggctgacgctgaggccgatggtcgcctggccacgtccgccgagcctgctgatgtggctgttcgattcgccaccgcgctcgccgtgtgcgatgcgttgctgggtgtggtggctggggatgccgccgatatttccggttccgctgatggtgtttcggtcgatgattcagcagacgccgcagacagtgttgccgccagtgcagccgccaaggttctgccgattctgctctacgtcaacgaactgcgcgagcagtgctcggtgccgcgcatctgcctgactgacaagcagattcttgatctgattgaagcccgcgccaatacctctggcgccgactctttggccgctaccgccgagttcatcgccccgctggctcaagccgaatgggacaagcaccgcgaagacgtgctctggaacccggacgaggccaagcgccaagccaaggaagaggatgaaaagcgcaacaaggaggccctggccgccaagttcgcacacatcaaggacgaccccaacaaggaaaccgtggagttgtaagcggtatttcccagctctttggggaaatcttcgcgttggcgatgccctagcgcaacgatttctcgaaataagccctaagttcgagagatctttgcgctgagtgcgggtaagcgcaaataattctcgaactcaaggcttatttcgagaaattgttgcgctgagagtgagtgagcgcaaagatttctcgagatcaaggattactgcgagaaatctttgtgctggtaaccgttatgggtgaactattcgttgtcgaatcgtttcttcatgtccaatcggcgtcgcaagatgccgtgaacacttataaatcaggggggattatggatatcgtggttggtgggttcggcgagttgcgcaatgcggcatgcccgggcatctaacaattgatattgaacgccggcggcaatgccagcaatgacagcgacgatgccgcactgcttagccgtggaaggctgcttgctgacgtgccatcgcccacatggatggagcttcataccgctgcggacggcagccaggtgctgtatgcggtgttggaagacaccaatgagatagcgtcatttcgcgtcgagggggcgggcgactcattgcggcttgtggagctgtcccgcgtacccacgccgggtcatgccgtcactcatgtggtgtttgtgcgcgacgacgaaggtcagggtcgcctcatcaccgccgactacgccgacgggtacgtttgcgtgcatccggtaacggaatccggtgtaatcctcgaagtcgcacagatgctacgcggtgaggggcatgggccgctgccgaagccggatcaggcggtttcgctggcgtttgtgccatggaatgcactgcaggggaacgcgggtgccgtggcagccagcgagggcatagctgggttggcgtatgtggggctgcgtggttccgaacgcatcgtgacgttgttgtgggatggcaagcggcttacccggcttgacgagccggatgttcctggttggcgtggccgtggcattgattgtgccgggagccgtccgcgtcacttattggcgattggcaatctactgcttgccgccaatgaggcctcaaataatgtggccattttccgtctctccgccgatggcgaaccgaaccttgccgccacactgccttctggagctccgaccgtgttcgtgcggttgtaaagcaatgcatacgagaaaaccgcatcctcaatcgtgatatctgtatttttccagcctaacgattgggggtgcggttttttcagtgggaagaccggtttgaccgggttgccttatcgtaatgtcactgaccttgccacggattctggccgtcgtcctcgttgtcggaagccgggatggttgaatcatccggtgcgacagccggctcggcggtaggagctggcgtggcgggctgtccgtagttagaagcgggagccgccggctgaccatagtcaggggtttgtgcggcagcgggctgcgtgtaggtggcaggtgtcgcgggctggctgtagtcgggcgcagtgggagccggctgaccgtaagcggtaggtgcggccggtgcagtcgactgcgcgtacgggtcgtggcccggtacaggctgagcagtctgctgggcatacggattataagccggtgcggtcggtgcggactgcccgtaaggcgcggcattcgggtcgccatagcccggcgtggcctgagcgtagccgttcggagcgccagcggggggaaccggagcgccataagggacggctgcggcgaaatcgtcgtcaaaacgcgcgccttccggcttgctgggtagcgtcatgaacacaatgtagacaatgcccgctgcggccgcgattatcgcgccgatgaacaggatgccaaggctacccgctgcggctgtggcatagtagccgctgtcagaggggcttccccagactctgaggacgccgaagagtgcagcgccgccgccaacaatcatgaggattgcgccagcaaacacggctccatagaagatggcaagccaccagccgggcttgttgatgtcgtggagacggcgaacggatagtgcgatgctcgggacgagtatggccaggctccacagcgaagagaggaatgacaggtggtcattggagacatccacgaggattgtcagcacgacttgaatggcaaagctggccagcatccaccaccagaattcgctgcgggatgcgcggcccttgaacaccacgtacttcttccaaaaacgcaggaatgcctcttggaaggagcatccgtagtagggcttgttcagcggaaccgcgttggtgtctgtggcggctgcgggcgcggggtaagcgttgtaggtgggcggcacttggccgtatgcgccatcgggctgaccgtagggattgccattgggctggccatacgcagactggccgtaggcgggagccgattgcgcgccggctggttggccgtaaggctggctgtatgccgggttgggttgcgtcggctgctcctgtccatatgcgggctgtccgtaagggttgccggagagctgtccatatgcgggtgcgggagctccgtactgcggcgccgcggtattcggctcggctggattattggcgtcaggcgtgccgttggacgcaggatactgcggcgcgggcgcaccattgttgggatcggtcattgatacccctttcacaagatgagactcatcgtctctcatttttccagttttttatgaaaaacccaacaggaacaatgaatgttgtctgaatgtggacagtcttggcgatatagcgtgatttgttatcacattgatgtcgaatgatgatgaccgtttctgtttggtcgtgttactgtaagacaagatttgcgtacggctgcagggacggagctggcgggcaagcgaagttctcggcgcaatgaataccaacaataagacgtaaggaacaccaatgaaccgcgattacgctgacactgacgtcaacgtcgaccttcacgaatcccgtgagagcgagtcccaagactgggatctgctcttcgtgagtctgtcctgctgattccaagggtggcgcgtccggcgcgcgcggcacaataggggactatgactgatgctgaaaacaccaaacccgaactccccgagaacgttcgcgtccgcttctgcccgtctccgactggcaccccgcacgtcggcatgattcgcaccgccctgttcaactgggcggaggcccgcgccactggcggcaagctggtcttccgtatcgaagacaccgacaccgtgcgcgacagcgaggaaagctacaaccagattctagaatccctgcgttggctgggcatcgactgggacgagggcatcgacgtgggcggcccccacggcccgtaccgccagtccgagcgcaccgacatctacaaggacgtggccgccaagctgctggccgccggctacgcctacgagtccttctccactcctgaggagatcaaggagcgcaaccttgctgctggccgcccggccgagttcggctacgacggttacgaccgcaacctgaccgacgagcagaaggccgctttccgtgccgaaggccgcaagccggcgctgcgtctgcgcatgcccgacgaggacatcgcttttgacgatctgatccgtggcaccatcgaattcaaggccggttccgtgccggactacgtgatcgtgcgcccgaacggcgacccgctgtacacgctgaccaacccggttgatgacgcactcatggaaatcaacgtggtgctgcgcggcgaggatctgctgagctccaccccgcgtcagattgtgctgtaccgctacctcatggaactgggcatcgccaaagaaatgccgctgttcggccacatgccgtacgtgatgggccagggcaacaagaagctctccaagcgcgatcctgaatccaacctgttcaaccaccgcgacaacggcttcattcgcgagggcctgctcaactacctggccctgctcggctggtcgattgcgccggatcgcgacgtgttctccatggacgagatgatcgccaagttcgacgtgcgcgacgtgaaggccaacccggcccgcttcgacatcgacaaggccatctccatcaacgctgagcacatccgcatgcttgagcccgaggacttcctgcgccgctctgtgccgtacctgcaccgtgatggtgtggtttccgcggataactgggacgcgctgactgcccgcgagcaagagattctgaccgccgctgccccgctggttcagccgcgtgtgcggctgctgggcgaggttgccggcatggtcggctccctgctgtccaccgaggaatatctggagcctgcggatgacgccaagaagcagctcaaggattccgccggagaagtgctggacgccgccatcgccgcgctggaaggtgtggatgaggctgattggaagaccgattccctgcacgagctgctcaacaagacgctggttgaggacggcggatacaagccgcgcctggccttcggcccggtccgtgtggccatgtccggccgccgagtttccccgccgctcttcgagtccatggagatcgtcggcaagccgctgaccgtcgcccgcctgaagggcctgcgcgcgcacctgtgatttctcttcctgaggggaagctaaaggcgggcatctgtttacgcagatgcccgccttcgcgtactccaagcaatgcctgtgctgccgttgtgacttgaaatgccgagcgcatgcattcattaggtagattggccattcacttggtagatgctccgtcacgccggtcattggaatggcgggtttctgtggatgcagcttgagcgccacctaccaaatgaatggccaatctacctaatgaatgagctgagagacctctgctgtgcattttggccgatgatgatgtaactagatgcgggtgggttcggctaatgcatggtgcgacacgccgggagttgcggtgatctgtatcctcgcgtacagtattcatctgttgcgcggttcgcctcacaaccagtgaaaactgaatatgcccccatcgtctagcggtctaggactacgccctctcacggcgccaacaccggttcaaatccggttgggggtacgacgaacaactcttcggagttgctacgccaagccaaattggggtgtggtgtaattggcaacacagctgattctggttcagccattcttggttcgagtccaggcaccccagccaatgaccctcgcggattcgcgagggttttttgttttccccggtcgaatctcggcggtgcgaatcatgccgacgtgcggagtgccagtcggagacgggcagaagcggacgcgaacgttctcggggagttcgggtttggtgttttcagcatcagtcataatcccctattgtgccgcgagtgcggacgccggtgaacagcagcgcggtcggtttcttgtccacataggtggcgagatgttctcgaatcttgccggccaagggcgcgggcacttcgatatcgcgcttgctactgggcgtacttgtccttcgtggtctgtctgataggcttgttgccacccctgcgcctgttctccacgaacgttccttggcttcctgtctatgcatcaaggagttgattgacggttcgaatggactttcatggcacccgtatgcgttcgtgtggcgttcatcggagggggtctcagggggaaccttcgcgctgggccgaccggtattcgctgcgatgcgcttgcgatacggaggctgggattgttgcgaaccaaaatgaaaaaactgcgcggagaacatgaagggattcgaatcggcccactgacgggacacatgggacgcggtcggacttcgatgacgaatacacggcaggcgaaggctcgaaggcgttttcggaatcgtcggttccgatatgtgacacgcgcggcgggtcggggccagaggtgtccaaacggagggtacctggagggaaccggcaatcggggggaatcaaagcgaaaccccggaaaccgaatgattccaacggtttccggggttcaaatccgggcggaggatacgagattcgaactcgtgaggctgttacaccaacacgctttccaagcgtgcgccatagaccactaggcgaatcctccatgccgtactatgctcggtgaaaccgtgctcagtaggcaactcgaataaactaccacaggtctcggataagtgcatactcggcgtggcgtgagttcgaatctcgtatcctccgcctccgatttttggtgcgcggacagctttgtcgctcgcgtctctcgtcttttggctgtgcaaatgcatcgtggatgagaagtctgcctcatgctgagctgcgcagtcgcacaacagtacagccgtgcagtcaaaaaacacacagccgcatagccgcacaatatgaggggatgttaccgctcacatgctggaatcgcagtcagcattgagcgccaatctttcaaatagtgagacattttaatggctcttgaatgacgaaaccagctctcaataccgcacatctactagaaaatcaagactgttgttgaagaatttttttctatagagttcatagttggtcttgagctattgagctattgaggtatttgcagtgagagagggtttagcatggttcgtcgcgcctgtgcgcagtccgctgaactgaacacaattcgagaacacgacacgcacgttgccgattccttcgcgcgcgcgatgcgggtggacgctgcccatcagcagtcgtccccgatttcggcgcgtgcaatggctgccgtcgtgttcctgttcgcattgattgccgcgaccttccttcccgccgcagtcatcccgcagtctgccttcgcggatacgccaacggccacggtgtttaccgcagccgataagacggacaccagcggcgttgagtacgcgacctgggccgacgtgtccaaggccatcgaggcacagctgcaagaaggcgccaaagaatataagtccggcaacactgccggttccacgtccgcgtttatgtccgcgtacaacaccatctacatcgcctccaacttcaccgccgtggtgcgtgacaccattagctcggataagcagaccgcccagcagcaggctttccaagacatacagaacctctcttacacggccggcaacgatgatcagctcacccaaaaaatcgacgccctgagcgccgacctcgacgccactgcccagcagctcgacgccaatacccagctcgccaagccgaagcagtacaacgagaatctccagaagcagatcgccaaggagcgcaaggaactcgacgccaagaagaagcgcaccaagaacacggccaagacttggaaagacgtcgcagacgcgatgcttccgattctggacaacgcctacaaggcctatgaaggcggcgacgctaccaagggcgccacgcttgtgaatgacgcctactaccagcactacgaaaagctcggtttcgagaagaccgtgctgagcgccatcagtggcaaccgcgtctcccaggtggaataccagttcaagctgtgccgctcctcgatgaacaccggcaagtcgacctctgaagtcaagaagtacgtcgaagacctgaagagcatgctgactaccgatgccgccaagctcgacggtggcgctgccgatcaggagggcggattcctcaagttcatcaccagctcggtcggccaagcattcctgattcttatccgtgagggtctcgaagccctgctcgtggtcgccgccgtggtggcctacctcgtcaagtccggcaacaagcgcttcaccaagtggatctacgtgggcgtgctcgccggtctggccggcgcaggcgtggtggcaatcatcttcatgttcgcgttcggtggctccggcccgctgcaggagatcatggagggcgtgtgcgcgctcatcgccatgtgcatgctgctgtggaccagcaactggatgctcaacaagtcctcggtcgaggcctggaaccgctacatcaagggaaagaccgaagccgcagtggcgtccgtctcctcgcaggtcgaggccggcgagaaggtggcttcccgtacggtggtctcgctcgccatgttgagcttcctcgccgtgttccgcgagggcgccgaaaccgtggtcttctaccagtccatctacacgatgagccaggatacgcacggcatggtggtcggtgcactcgccgccgccgtggttctcgtgattatcttcctggtgattcgcttcacctccgtgaagattccgattggcccgttcttcctcgtcacctcgatcctcatgtccgtactggtggttgtttttgccggcggcggtgtgcatgcgctgatcgagggcgacctgctgcccgccaactacttgccgggcatgcccaccaacgattggcttggcttctacccgtacgttgaatgcatcatcgctcaggtgttggcggccatcgccgtcatcgcgctgttcgcggtcggattcatcaaacagcgcaaagccaaggcccagctcgccgtcgccccggatgcgaaggccagcgaggctgccgctcaggcgtaacacaacacaacacttgcggcgtggaaacggaagcgattccgccccgtgccgccacagctaaaaaacaaaataagtcgtgaataatccattcaccacaacaaaaggaatatagagaaatgatgaagaacaagaagcttgccgctctgctcggcgtgctgctcgccggctccatggctgtttcgatggctgcttgcggttcgtccaacaacgcctctgacaccaaggcgtctaccagctcctccgacaccgccaagaaggacgattcagccaaggctgatgccccgagcgataccgctggctttgaagaggtcccggttggtccttccggcaccgctgaggagcaggataagcctgccggcccgctgaccgtgggcgctgtctacttccagccgatcgacatggagcccgcctcctccggtctgaaggccgccgatgcgagcttccacctggaagccgacatccacgcctcccaggaaggcaccgactacggctacggcaagggcgacttcgttcctgacctgaccgtgaactacaccatcatcgacaagtccaccggcaaggaggtcgagggcggcaaggccacctccggtaccttcatgcagatgaacgcctccgacggcccgcactatggcgccaacgtcaagctcgacaaggctggcacctaccagctcaagctctccatcgagtccccggcctccaagggctggatgctgcacgtcgacccggagaccggtgtgaagaaccaccagttctggaccgagccgatcgaggtcaccttcgacaactgggactacactccgcgtcagtggtgattatcttcgttcgtcgatagcatggcctcctcgtcagagggggctttacgccgctttagggagataattcttagggcggcttaaaatttcccctcagtccgctgcacggacagcttccctcccggaggggagctaagaaacaggcaaagaaaggacgcgaatgcttgaacaattcgtggcagtgatgccgggaacattggcccccgcattactggtgatgtgcctgagcgtgatgctcgcggtcggcgaagggcgagacaagcccgccagcgcgcattggcgtctcatcggcctgatcgttggcctgatcgccgccatcgtgttcgcgagcctgcgcgcctcggccgtgatcaaccagcgcacattcgtcaactatccggtgctgtggtgcgcgatcattgccgacatcctcgccatcatcgtcgtagtgttcgcacgtcgcatcaccaccaattggcagcggcacaaggccatcatgcacatcgcgaacgccatcgccgccatcgacatcgcgctcaccctgttctacgcactgccggacgttattctgcagttgaccatctgggtggagcccggcgatccgatcttcacctccgacatgctgctgcgcgcgctcggcttcgcgctgggtctggccatgtcgattatcgtggccgccatcttccgcacgctgcgctccaccgcagtgcgcgcctcgttcgccgccgcggtcctcgcggtgatggtgattctcttcatccagcacctgaccggtgtcatgcagattctgcaggcgcgcggtttcccgatgggccacacggccttcgtggccctcgcatggtcgatcaaccacaacagctggatgatcatggcgcaggcattcgtgttcctgattccggccgtcgcctccgtggtggccggcttccgcatgccgctgaccggtgcgaacgaagccatcggacgcaaacacaaggcattccgccgctgtgccgtggcctccgccgtatggagcctcgtggcgatgattggtgtcacgctgaccctcaccgtcggcgtcgccgcaacccagcagaccatcactctttcgccgccggaggcctactcactcaaggacggcgtggccaccatcccattcagccaagttgaggacggccatctgcaccgctttgaatacaaggccaaggacggcaccgtcatgcgctttatcatcatcaagaagaacggtggtgcgtatggcatcggtctggacgcctgcgagaactgtggtgacgccggctattacgaaaaggatggcaagatcatctgcaagaagtgcgaggtggccatcaatctggcgaccatcggcttcaagggtggctgcaacccgattccgttcccgtacaagaccggcaacggcaagatcaccattcaaaccaccgatctggacgcgctgagcgcccacttccagtgagtgaaggcaggaggcaaaaaccatgttctttctgcgtatgatcgctcgatcgttcacccgccagctgcgccggcgcctgctcatcgcgcttaccgtatgtctttcggcgacggtgtctgtgtcgatgctgggcgtcgtgttcgacgtgggcgacaagctcaacgccgagctgtccacctacggttcgaacatcactgtgcagcccaaggcggatgcggtcgtctccgacctgtacaacaccgaggcaggcggtgtggcgtccactagcgatccgacggcctttctgaaggaatcggacgcggccaagatcaaaacaattttctgggcgttcaacatcaccaacttcgcgccgcagctcaacattcacgccaccgtaaacggcaccaatgcgtcgatcgtcggcacctggttcaacaagaacctgaagctctccaccggcgagaccaccgtggtgggcgtcgagggcatgcgttcgtggtggcagcttgacggcaagtggcccaaggacgattccgaccagggcattatcggcaagacgctggccaccgaactcggcgtaacaaccggcgacaccgtgaccctcaacaaaaccaccgtctcgggcaagaagaacgagcagaaaatcacgctcaccggcgtctacgattccggtgacgaggataacggctcgctatacatcgcatcctccatcgctcaggtgctggccgatttgcccgattcggtggacaagatcgaggtcaaggccctgaccacgccggagaacgacttggctcgtaaggctgcgcagaacccgtccgtgctgagccaggacgagtgggagacctggtactgcaccgcctacccaagctcaatcgcctaccaaattgaagaggtgattccgggcgctgtggccaagcaggtgcgtcaggtggccgctttgcaaggcaatgtgctgcagaagacgcaggccgtgatgattctgatgacagtgctgagcctgattgccgccgccgtggccgtggctaatctgatggtcgcctcgatcggcgaacggtccggtgaactggcgttgctcaaggcgctcggtgccaccgatgccgcagtgtcccgcctgatgatggctgaaacggcgacgatttcgttgctgggcgcgattgtgggtgcgctgcttggttcgggtgtggcgcagctgattgggcaggtggtgttcggctccggcatcaccatgcgccccatggtgttcgtgctggtgttcgtgctgctggccgtcaccgtgctgttggcatccgcctcttcgattcgttcgattctgaacctcaagcccgcggaggtgctccatggccgctgagtttgcccacataactgggaaggaggaaaccgatgactaacaccggcatgttcttcaggatgctgttcagcgccgtgttccgccgtcgttcgcgcgcgatgatggcggtagtggcgtctctggtcggcgcggccacactgttctgcttggcgatgatttgcatcgccgtgccgcagcagatgaatgaggagatgcgtgcgtatggcgcaaatctgattgtcacgcctaccgaatccactggggataaggccggcatagatgagtcgatggtccagcacaccactgaaatggtcaaagccaagggttctgcgaaatacgccacctatcgctacgaaaacgtgcgtgtgaacgcgtctccgtatgtgatggccggtgtcgatgcagcgcaggtaaagaacctcaatcatcactgggtggtcgacggtaagtggccgtcctccggcaaggtgctggtcggccgtgacatcgccgatgctatcggtctcaaggtgggctccgccatcactatcggttaccgtgcgtccgataatgccagctctactggtacttcggcctcctctaacgaggggactggctcggcgaatgacgagacctcctcaagcagctcccaaaactcgtccagcgacatgcaaggcatggatatgtctggcgacatggctggtatggatatgtcaggctcgtcatcctcggaccagtcgtcctcaagccaaacctctaatggccaatcaggccaatccccatccgatcagccaactcaagacggccgcgtctccagcgacatcatggatacctccggcactgaattccgtgtggccggcatcgtggacaccggcggcagcgaggattcgatcatctacgccaccaacgccgacgtcaacaagctcaccggcgtgacgcgcggcgtggacgttattgaatattcggccggaaccagcgacctcgcagggctggtttccagtatcaatgagatgacttccatgcacgtcaaggcgcagcaggtcactaagatcaccgcctctgacacccgcatcatcaccatgttgcagacgctgttctgggtcgtctcgctcgtggtgctggtgcttacgctcgtcggcgttggcaccacaatcagctcgatcgtctcgcagcgacgcaacgaaatcggcctgcgtaaggccctcggtgccagctcacgcgcaatcggcattgagttttatgtcgaatcggtgttttacggcctcatcggtggtctgattggcactgcaatcggctacggcctcgccagctggctgtgcgtggcggtgttcgagcgctccatcggattcaactggtggctggcgctgatttccgcggtgttcagcgcgttggtcgccgtagtcgcctccatcccgcccgtccaccgcgccacccgtattgaccctgccgttgtgcttcgcgaagaataaagaaagagaatcgtcatgctacttgaactcgaccacatctcgaagatctacggcgacctgcacgccgtagacgacctcaacctgaccgtgccggaaggcgaatggctggccatcgtcggttcctccggttcgggcaagaccacgctgatgaacatgattggctgcatggacacgccctccaagggttccgtgaagctcgagggccgcaagctggaggatctgaacgccacgcagctggccgacgtgcgtaagaacctcatcggcctggtattccagaagttttatctggtgccgcacctgaccgctgtggaaaacgtgatggtggcgcagtactaccattcggtggtcgatgagaagcaggccatggaagcgctggagaaagtcggtctgaaggatcgcgcccaccacctgcctggccagctctccggcggcgagcagcagcgcgtgtgcgtggctcgtgcgctaatcaacgatccgaagctgattctggccgacgagcccaccggtaaccttgacgagaagaacgagaagatcgtgctcgacctgttccgcaagctgcatgaacagggcaccacaatcattgtggttacgcacgatgcgctggtcgctagctgcgcgcagcgcgagatcatgctcaaccacggcgtgctcgtcggcgagaagtggaatgacgaggatgcgcgcaaggcgtatgaggcggtcggtggcaagcccgcttccacgggtgcgcaggtggaaggcgcacaaaacggcgaaaccgccatcggattcgccgaccccaccaaggccgcaaaaaccggcggcgaagagtagggccgtatattggcttcccccgggcgcgaggggagccagtgtgaggtgcgaataggatattgaatatgactgaaaagaacacgttgaagaagtccgcgacgctggcggcggctggactggtcgtggccggtgcgctgctggccgggtgtggcgaatccaaggccacgccgatggatgacgcgtatgccggcaattcgggcgagacccagaaatcgcaggaagagcagtcgcaatcccagtcggatagctcgaatggttccgattccagctcgtctcagaacgacccgtccaccaccacatccggcaaaaaggacaccggcaactacaaggacggcgactactccatcaacggtcagtatggcccggtcggcgaggattccatcgatgttcatctgaccatcaaggacggcaacgttgagaacgtggaaatcgtgggtcacccgttcaccaagatttccaagggccaccaagatgacttcgccaaagccatcaacggcgtggtggacggcaagcccctgaagggcctcaaggtggataaggtcgccggcgccagctggacttccgacgcctttaacaaagccctcgaagtcgcccgccaagaggcgtccattcagtagtaggtagacatctgcagatttttcaaccgcgggaatgggcattctccgcttcaaggggctgatttggcctttgcggaacttctacttgcgtttcgaggggctgcttgagggtgagatctcaactatcagacgcatattggttacgttattctgccgtttttagtgcctgtctactttgccatcagccccttgaagcggagatagatgttctgaaaagaccaaatcagcccctcgaaggcgaagtgcacgtgtagtccgttacttcagtaacgccggccagagtagatcagacatacgggcggcccaggcggtgtcgtcatccatcgctttgccttcgatggcctcgtacgccaccaaagacccgatgatggtggataacagcagtttctcgtcagcactttcgcggaatacaccttgcgtcacgccctgcttcaagaatgcggcaactcgactcagccacggcgtaatcacctgattgacaatgtgctggaaaaattcggcctcgctggatagcacaatgcctacgcgcttgacatcgatgttgttattgcgcacccagtccaccagtcgttgcaacaactgagtgaaatgctcccgcgtggggctgggtactgggccggcgtccgggttgaccagatacatggcactgatctcgcgcagcagctcgccggcattatggtaacggcggtaaatcgtggttttggccacgccggaacgacgagccacctcttcgatggtcacgccgctgatgccgcgatccacggcgatctgcagcgtggcctgcatcagcttgcgatccgtcgcctcgcgggtgcgctcgcctcggagcatcgtgtccgttgtcctctccatcatctcttctcttcaacatgtgctcccgctggcgggagctggccggcgaagccggactgagggtggttcatgtcgtcggctcgggccatattccctagctcagtaccttagtgctctcgacctgcgccacataccactggttgaacttcaccagtggcttgcgcagcagcagtcccaacagcaacagcggcggtatgaacgccagcagcagtccggcagccctccaatagtccatgtcgtagatgccggcaatagccgcgcgcatcatcgtcactgcgtgggtgagtggcaggaacgggctgactttcgcgatgaaatcaggcagcatttgcatcgggtaggcggcgttcgcgcccgatatctgcacgatgagcatcagcacgccgattgccttgcccacattgccgaagctcgccaccatggtgtaggcaaagaacgagaacaccagcgaagccagccatcctgtcagcatgaacagcagcggatgcacggcctgcacgtgcaggaacagcaaatcgccgcccaaggacacagtggactgcagcaacgcaatcagcgcgaacaccccgtaatggcctaggaatagctgatgcgggcgcgggttgcccagtgattcgcgggtgcgccgcgacacggaggttttgagcgtgaccgccatcagtagcgatccgacccacagcggaatcagcgtatagaacggggccattgaggagccgaaattcgccacagggaacacggccttgcgtttgagctgcactggagcggccaaggtgctggccaacgtttcggggtcgttgcccaacacctccttgaccatgctcatgtcgccgctgttcagtgcctcgctcagcttgccgttgaacgacgtcagttcggagcttgcggagcgtagtttgttggccgttttgtccaatgtggcgtgggcatcggcaagcatgctgtcggcatcgcttgatgtgcttcgcagatcgctgagtgtggtgttcaacttggccgcgctggtgtccagaacactggcagcatcggcaaccgtggccgacaaggactcgatttgtggctgcacgttactggcgtaatccgcggtgatgctggcaatgctgttttgcgcctgcttggccagatccttgacctgcgcccgctggttctgcgcgtcttggttgccctggcggatatcgctggctgtcgtgttcagcgcctgctgcaacctggtctgccgtgtgattgagcggtccaatgccttgacgatggacgaatcgtcgcccagtagtccggccagcgtattgcggatttcggtgtattgcgcggtctgcttgcccacggctgtggcctggtgttccagctcgtcggcggtcgtggtggctccgctgttcgcgtcggcatagagcttgtcgatggaatcggacaccgcgccgaagctggaggcactcgtgtccagcgcgttgctcattgcctcggtggtggtgctgagtgcgccggccacatcgctgacgccttgtttggcgcctttgagatctgtgctgccttgttgcgcggcgctggaagcctgcgtgatgagcgcgttcgcggtgtccagcagagcgccggcggaatcggtgagtgagccataggtgccgagaagatcggcggtgctctcgagctgggtggcgaatccggcgatattcgtattgaaggtgttcagttgctctttcgctgcgggcgtggagagttggtcagccagcgatgacgcgatctccagcccggctgaggtgatggttttggcaaagacggtgttgatttccgccgccacctcgtcggtgccctcgttgagtaggttcggagccagcgcgttcttcttctcgttgcggtagtaggtcagctcggcgtgctgcacatcgtcggagaagaaggtcatcatgtctttgctgaactgcttcggaatcacgatggccgcatagtatttaccggatttcgcgccttcgatggcgtcggacttggaggtgatggtccagtcgagttcgctgttggcgcgcagggcgttgaccacttggtcgcccacggtgactttaaccggaatcagatcggatcgatagccctcatccacattggctacggcgaacttcaggttcttcatgttagagaacggatcccagcaagcggccacattgaaccaggtgaacaggccgggaatcatgaccaagccaatcacgatgatgatggacaccacattgctggtcaagcgcttgatgtcgccggtaaagagcttccagattgtgctcatcgtgcgtgcttgccttccttggtcggcagtgttgcgggaatggtaagggtgtctgcgctgtggtcgggccgtgcctcgacgttggccggcggccggtgaccggttttatgcctgtacagcatggtgcgaatcgattcgtcggagaggttgccgagttcggtttggcggcggatggaatcgcgcatatattccacgaccatcaggaagccgacgatgatgagcacccatgccagccacgtgcccatcaccacgatcttctcgctggtggtcagcgagaagacgatgatgagcgctgccggcaccacgaatccggcaatcaacgcgcccagcaagaggcgtgggtagtggtaggcgaatttggcggcgcggcgctcgatggcgtggcggtattcctcgcggtcggccagtgcggcgatagcctgggtgacgcggtattcgttgctggtgatgtgcaccggctcgccgataatcatgtcgctttccttgatttcgcgggcgaacagacggttgagattcgccagcttggggcgggcgccgagaccgagcaggaaggcgagcatggcgaaaattagcagtttgccgatgtagccaaaccagtgaccgtcatagaaaccgccgatggtctcgcgcaaggcatcgatggaataggtgaacggcagcaacgggtaaagcgtgcggaagaatcccggcatcatttcgatcgggtacaagccggaggcgccaggcacctgcaggatgaccagcgccacgcacacgcctttgcctacgtgcatgaaggtggtggagagggcgaaaatcactgacatgtacaccagtgaagtgatgacgcaggtgagcaggaacacgggcgcgctcgcgcattgaatgccgatgatgaggtcgccgatgccagtgacaaggccctgggttgcggccagcgtggccagcagcaggaaacggccaagatagccctgggagggggtgaggttatcgatgtcttcatcgtcggtctcgagcttgggaatcactacaagcacgaatgcgcccacccacagagacagggtggtgaacagcggtgccatgccggaaccataagcggcgaccggatagatggccttctcgctaatgacggtgggagagagcatgaagtcggatattgtgctggcgtcgagtttgccgtcggcgccgataagcgcgtttagcgaactggagatgctcagggccttgatatccgtggcgagtgtgctgagtttggtctgcacaccggccagagcctggtcggtgctgttcaacgcggttgtggtggaggagaccgctttgtcgagctggtcgagggtctgctccgattgatcgatgagcgagctttgcgaggtgatgccgttggacagcgtactggctgtggaactcaacgtgttcaggccggtgttgagttggggaagcgcgccggaaaccagtgtactgcgtgcggtgttggtggcatccagtgtggtctgggtagcggtgttgaggctgctggccaggcctgcggtatcggtgtaggtgttaccgatggtggtgttgagactgctgagattattcagggtttcggcgaggttgctattgcggttgtccagcttgctgatggcggatttgagcggttcctgattggcgttcggcagttccttgagctgggcgatgacatcggcgttggcctgattgatgtctgcggcggtattgatcatgccgcctacctgctggttggcggagttcagcatgccggttactgtgccgatgctctgattggctcgagaggaagcctggctcagcaggcttgacccttggtcgagggagccggatgtggcggtgacgaaagtattcaggctggtctgtgtggtgccgatgagtttggacgcgccggccagcccctgtgcggtgtcgatgccgagttctcgtgcgtcttccagcgcttggcgggccgtccgtgtttgttcaggcgtgccggcgagcttggtgttgagtttggcgatggtgtctcgcgtgtgctgcacgtcactggaggcttcattgagtgtagtgatcgttttggctttggtctggtcttcggcagcgatggccttgtctccgaccgtgttgatgacttcggtaagcacctcggacacggtggacacaaaagtggagttgaccgtgcggtccacggtggatgcgccgacgtcggtgactttgggcgcgatggcgctggctttctcgttgacgtagtactggagggtgggtttgtctttgccgccggtcaccacaccggcaagatcattggagaaatccttgggaatcacgatggcggcataggctttgccggattcgacctggctcattgcttcggcctcggtaacgaaggtccagccgagctggtcgttgtctttaagctggttgacgatttggccgccaagattttgtttgccgatcagggcgttgtcggtgccggtgtcgttgttggccacggcgacggtgatgccgttggtgttgccgtatggatcccagaagccgacgatgttgtaccaggaatacagcggcggaatgaacaccataccgaacatgatcacccaggctgccggcactgtgaacaggcgcgcgaagtcgcgcttgagaaccttcaggatgttgcccactgatacccccggagcctgctgctggattactgcgtttctcgtagcgatacggtaagcgtagcgctacggtttaagtagcgtaataccgccgggggagattgatgggtgatttcgtccgaatatgcgactgtccgacggcttatcgtgcgccgttgggcagtgtgtctggttttggtgtttgtggggcgttgaaaagagttgttttgggcggtatcctctccctgccgggaaagcccaccgcgtggttaacttttcaccgcgatgtgtttgtcccaccacgtagtgactgttccacggcgaggtgtcgcaaaatggctttattcagccaaaaccaaaatcctgctgacagcgtggtggaagttttactacgtggtggggtgttcgccgcgtggtggaggtgactgtaagggtgtcaaactgttttgatgctcctaagtttggcaaacccccgattggggtgatagcgtgagatgacgccacgcggagggaaatcatgctcagaaacgacgatgcggccgcaagccccgggaatgcgcgggagcgccgcagcggcatggatatgccgggcacacatgcggattccgaggataggactgccgcggacaacattgtccacgttgccgatggtgccaagtccgccgtcgtggctgatttggtggccgacgagttggacgttgtcggtctgaatcccgatgccaagcgtctgccgattctggcgcgtatctatggtgtgctggtactgctcgacggtctggccgtgctgccgctggtggtgctgacctgcatctactccgtgcgtgagattctgaatggccgtgtgcacgtcgatgcgatgagtctgaccttcattctttccgtggtctacgcgttggtgctgattgtcagtgccgtatgcctcatcgtgttcggtgttctgctattgcgtaatcaccgccgttatgccgcgcgatggacgtatgtgctgatgcctctcaccttggccgacggcatgctgtctctggcgctgaccggcctcgggttcaacctgttgctgccgattatccagatgatcatcctcatcgtgatttcggtgactgccgatccctccctgatagaggagagacgcttgcaacgcgcgctcaagcgtatggatgagcgcgatgagtacgagtccgccgttgctgtcggcatgcttgggcgtgaccagtccggcaaaggctatatcgcactggacttcttcaatatcttctggctgttcaccatcgcttcagtgggcggcttgattatggagacgatatatcattttgcgctctataacggtgagctgcaggaccgcgcgggtctgctgtgggggccgttctcgccgatttacggctgcggtgcggttttggtcaccgtgtgtttgaaccgcatgtggaaggcgaacccgtttctgattttctgcgcgtcggcggtgattggcggtgcgttcgaatactgcacgagttggttcatggaagtggcattcggcataaccgcatgggactacaccggtcgctggctgtccattgacgggcgtacgtcgggccagttcatgttcttctggggtctgattggcgtggtgtgggtccgctggctgttgcctcgcctgctcgcgctcatcaatcggatcccctggaaagtgcggtattcgttgactgcggtgtgtgcggtgctgatggtgatcgacatcgccttcaccctgatggccctagattgctggtatgggcgcatggccggtcagccgcagacttcgccggttgcgatgtggttcagcgagcgttatagcgatgcctatatggccaatcgtttccagaccatgcacctcgatccctccaaggccgggcgaatgtgacgaatctcttatgcgagaggcgtaagacagctcgtgcgtggtgaccggccgggcgatagactggagcatgttgtgataatttggggtctccgacagggaggccgccggtcgcgccgctgccggggtcttggtctcggttgccgacgaaccggttgagcgggcaatcacatattgcccacctgtaaggaaaggcaaggcacatggccgaagctacggcaaacatcggtgtgatcggactggctgcgatgggttccaacctggcgcgcaacctggcacaccacggcaacacggtggcactgttcaaccgccactactcccgcaccgaaaagctgatgaatgagcatggcactgaaggcaacttcgtgccggccgaaacactcaaggagttcgccgcatccctgaagcgcccgcgtaccgcgattatcatggtcaaggccggtgcaccgactgacgcgactatcgagcagctggaagaggtgttcgagccgggcgacatcatcgtcgacggcggcaactccttcttcaaggacaccatcaagcgtgagaaggaagtgcgcgccaagggcttccacttcgtgggctgcggcgtgtccggtggcgaggagggcgcgctcaacggcccgtccctgatgcccggtggcactgcggaatcctggaagaccctgggcccgatcctcgagtccatcgccgccaaggtgaacggtgagccgtgcgtgacccacatcggcaccgatggtgccggccacttcgtcaagatggtgcataacggcatcgaatacgccgatatgcaggtgattggcgaggcttacgacattctgcgccgtgggctcggcatggacgccgaggagatcggcgatgtgttcgaggagtggaacaagggcgaccttgactcctacctcatcgagatcaccgctgagattctgcaccacaaggacgccgagaccggcaagccgttcgtggacgtggtcgtggatcacgccggcatgaagggcaccggtacctggactgtgcagaccggtctggagttcggttctccggtggccgcaatcggcgaggcagtgttcgctcgtgcgctttcctcccatggcgagctgcgtgaggatgctcagaaggaaggcctggccggcccgaacaagaccatcgatttggctggcgaagacaaggccgcgttcattgaggacgtgcgcaaggcgctgttcgcctccaaggtggtggcctacgcgcagggtctgaacgagattcaggatggagccaaggaatacggctgggatatcaacctgtccgaggtggcccgtatttggcgtggcggctgcattattcgtgcccagttcctgctcgaccgtatcaccgaggccttcaagggcgataacccgccggcctccctgctgttcgacccgtacttcgagaagattatcggcgaatcgcaggatgcatggcgtcgcgtgatcgtgcgcgctgtggaagccggtatcccgaccccggtgttctccagctccctggcctactacgatgggctgcgctccaagcgtctgcccaccgccctgacccagtcccagcgcgacctcttcggcgcccacacctacggccgcgtagacaagcccggcgtgttccatactttgtgggccgaagagggcaagccggaaatcgaagcgtagcttcggaagttccggcttaggggagcccggtgggctccccggctctcttcggagcgaggcggctgtgccgtcgggccaacactgagcctcgccgcaggcgggtccctgattgcagggccggaggcgaagagggcaagccggaaatcgaagcgtgacgatatagctgggctcccctcagagaggggagcccagctacagctttacagcttagtgacggtttcttccgtggagaaccagatgaattcgtccactccgttggcgtaggacgacggataattcggattattcggcttcgcaaatacgtgtgccagcgaatcggctttaccgacaccggcagcgaagaaccacgtgcggcgcgaactcgcaatcatcggagccgtcaaagaaacacgcaacggcggcatcttgggggagtgattcacacccacagccagccggtcggtgactttaacctcatcatggccggggaacagcgaagcgtaatggccatctggtcccatacccagaatcatcaggtcgatggtcggcttcgggccaagctcacggatgagctcggcctcgtaatcgcgtgcagcggcgtcaagcaacgcgtcgttggcagcgtcagcggcggcacgaacggcgtcgtcatcgctttcggcattggccatggcgtcggcaatctcgtcggtggaacgcacatcggctgccatctcatgaatattcgactcgggcagcttgccgtcggccaccagtttgtccagtagcagtcggcgggcttccagcgcattgcggtcggtatcgtacgccggcacaaaccgttcgtcactccaccagaaatgcacgcgagaccagtcaatcgcctcggccagcggatcatccagtaccaatcccagtggttgcgcggccgagccgccggacagcgccacgtccacgcgcgtgcgatgcgtactatccggcagcctttcagcaagcaaatcaagcaatgccagcgcaaaccgctgcgcgccggcctgaatcatcagatccatgtctggatagacgacaagtttacgagttgccataagtgttccttcacgtaaaaaagaccaccctcagtcagctcccgtcagcgggagccaatatgctcctcccgctgacgggaggtggcacgaagtgccggagggcggtcaaatgaatatgctcatcagtgacgaatcagatcccagcccttattgatgacatcggcgtaaatctcatccggatcgatgcgacgcaactcttcggtgaggcagtcctcaatcgtgcgtacgggaacggaaatcgtctgcggagcctgccccggcatggaaatcagtgcctgatcctcatacgggcgttccagtgacaccacgccgtcatcgcgagtcaggtacacgccggtcacagcctcggcatcgggtacgaattcggtttcgactggcactccgagcttgaggtgcagccatgcgcacagcagttccatcggcaggaagtcggccttgccggtcaccttggcagcagtgatgggcaggtgcggcggctgatccagcatggaggcgagcatcgcgcgccatacggtcaatcgggtccaggaaagatcgatgtcttctggagtccagttgcggcgcaggcgttcgatcgttgcctcgggattgttggagttcagggcgtcggtgatacggctgcgggccatcgcacccaacagatccttagaaggattcgacggtggcgtggtcggccaccaagccactactggtacatccggcaccagcagaggaatgaccagagtatccgggtgattgatcaggccgttgcgcgggcgcagaataataatctcgccggcaccggcatccgcgccgaagcgcacctgggcgttcagattggagtcattcgggtcggctgagccgtccgtcaggtcgactgccggattatcgcggttggcgctgacctcggcggcgacttcattggcgttcggctcgtcgttggattcgctgctgtgtgcggtatcgggcacaacggcgatcacgcggcaaggatgctcgcggctggccgaattggccacctcaagtgcgtgctccaggttggtgtcgtcggtggcgatcagcagcgtcaatacacggccggtcgccgattcgccgcgctcctcgtgcagttgctcgattttgtgcgcaatctcgcgggtgcgagtgttcggcatatcgatgatcatggcatcctccagtagcggccgtcgcgttccagcatctcatcggcctgtgccggtccccacgtaccagcgcggtaggcctgcggctggccgagcgtggcccagaattgttcaatcggatcgaggatttcccagctcaggttcacctcttcggtggtcgggaacagaggcggatcgccgagcagcacgtccagaatcagtcgctcataggcttccggcgagttttcggtgaaggagcggccatagctgaagtccatgttcacgtcacggacctccatggtggagccgcccggcaccttggcaccgaagcgcatggtgacgccttcatcgggctgcacgcgaattacgatagcgttcttgccgagttcgcgcacggcggtctgctcgaacggcaggtgcggggcgcgcttgaacaccacagcgatttcggtcacgcgcttgcccaggcgcttgccgcagcgcaggtagaacggcacgccggcccaacggcgggtgtcgatgtcaaggcggatggccgcataggtttcggtggtgctggaggggtcgatgcccttctcctcgaggtatccgaccacttcgtgcgaaccctgccatcccttggcgtactggccgcgtgcggtattggcggcaagatccttgggcagacgcacagcggagagcaccttggttttctcggcggtcagatccttggcggtgaagctcaccggctcttccatggcggtaagggccatgagctgaagcagatggttctggatcacgtctcgtgcggcgccgatgccgtcgtagtagccggcgcggccgccgatgccgatgtcttcggccatcgtgatctgcacgtgatccacataattggcgttccagatcggctcgtacatggcgttggcaaagcgcagagccagcaggttctgcacggtttccttgccgaggtagtgatcgatgcggaacacggagttcgggtcgaatacttcggagaccacgctgtcgagttccttggcgctggccaagtcatgaccgaacggcttctcgataatcacgcggcgccatgcaccttcggacgaacgagacaggccggacgcggccagctgcttggccacttgcgggaatgcgcgcggcggcaccgacatgtaaaaggcatgattgccgcgcgtaccgcggtcgcgatcaagctcctgcacagtggcgcttagacgctcaaaagcctcggggtcgtcgaacgtgccctgcacaaaacggatgccggcggccagattgcgccaggtcgattctttgaacggggtgcggcaatgtgcctgaaccgcggtcttgacgaattcgatgaaccgttcctgggtccaatcgcggcgtgcaaaaccggtcaggccgaagctcggcggcaataggccacggtttgccaagtcataaacggccggcaatagtttcttctgtgccagatcacccgtgacaccgaaaataacgaggctgcacgggccggcgatgcggggcaatcggaggtcgcgcgagtcgcgcaggggattgctccagttgggggattcactcatgattatcaagggtagccgccggaggctatctatcgctagaggcgatatacgatgtgggctgcgatttatcgcacatttgtgaagtgcgggcggggtaggagcggggtgaaggcgggagtccaagcgatgacgcggttcgagatgtgcgcgtgaacaccgtgcaggcatatcagcgtgctgccagcatttttccagtgttcgtgcgagtgctccaaagattggaatcagggcttttccatgtcagcccattgggagaaaatacatataaattagtaacacagtgtcaactttagaagtgaagtaattattatcgtgcctcgatcagtgtcttcgtcgtcgtatcctcatgagtcgaggcatgcctcccacgctgcaaagccgcatcgcccacatccacaaccgtgtaagcctcgccagctgcgccttgattggcaggccctgctgcgcttcttccagaatctgagtgagcggttgccgcaacgtcatcacggcaaggtcaagatacttaaaggttccgtatacacacggcgtcgcattgtggtgggctgcttgggcgtgctgctgttggtcgaattgttccagctgttctggccgtccgacaaattcttcccgctcgccacacttgacggtcatgccgtgggtgggcagagttcgcagcaggctgctgagacgcttaacgccgcaacattgaaacgcacagtaaagctgaccgataaaaccacaggcactacggtgtcgcttactgccaagcaggccggcatcacggtggattacacagaccgggccaaggcggcggccaagcattccgtggtcaagcgcattgttccgttctcctggctgttcgtgcacagcaccacatccgattccctgcccgatgcgctgggaacgtccgacaagcaggcgcatgaggatatgcgcaatgcttcggtgcaaggaacaaagggcgagctcaagatagtcagcgcggcgcccggctacacctttacttctgcggatattcgttctgccgctggatcgagtttttccagcagcgctaccggcgacttggccgcggcaaccatcgagatgggcatcgtgagccccacagtctctgacgacaccgccgagcaactgcttgacactttgaataaggcgctgagcaaggatgtcacgttcacctatgaagacggcacatggacagtgccggccaagaaaatcatcaatactgtcagtacgacagtgaatgcgcaagacaacaccaagctggacgttaccatcagcgaatccaaattaatgcggcagctcaaatccaaaggaatcgctctcaaggtggcaaagaaagccgctggtgccggtgtcgtacctgcgacgattgcggtgaaaggaaacgcctatcaagtcatagacgcgagtgccacggcggcatcgctgtcaggcatgctggccagcgggcagaatgcgccggttgccgtttcaaccaaggacttcagcaacgttgagttgtatgaaggtctgcccgccagcggcaccattgaggaaaagctccagcaattgttcggcgatgccgattatgaggtcgccgtctacgacctgaaaaccggcaaatccaagatccagattgacgcggataccgcgatggtctctgccagcacgtacaagctgttcatcgcttattcgatgatccatgctgtggaaaccggccaagtcacgtgggatagcgcgctcaatggcatgacgctgagttcctgcatggccacaatgatcattaattccgacaacagctgcccggaagcgtggctggaccgttacggcttcagcactatcacccaacaggcgcatgatatcggagccgccaacaccaacttcgtgccgtacgacatgaccaccaccgccaacgatttggccacagtgctcaagggcttctacagcaactcgattgcctctccagattccacggaccagctgttctcactgatggaaacacaggtgtaccgcgaaggtattcctgcgggcataggatcggacggcgtggtgcaggacaaggtcggcttcatggacggtttgctacacgatgccgcaatcgtgcgctccgataaaggcgactacgcgatggtcattatgaccgacggctcgagttggaacaaaatcgcccaagccagtctgctgatttacgagtctttgtgagttctgaaggcctgcggctgctgctggttttcgcaacgccgtagttgaaatatcccaagacggtgtgtagtttagtagagttgcccctctagctcaacggttagagcagcgtccttttaagtcgtgggttgtgggttcgaatcccacggggggcacgagtaaatccttggaatcgcaatggttccaaggatttttggttcgaccagcccagctcctagagtggtactccatgtcatgcaccacgattcttgtcggcaaaaacgccagctacgacggttccaccatcatcgcccgcgacgacgattcaggctccggccgttacgatcccaagcgtttcgtcgccgtcgcccctgaagaccagccgcgccactaccgcagtgtgctcagtcacgtcgaaatcgacctgccggacaatccctgccgttacaccatcgctcccaatgtgctgaacaatcgtggtgtgctggccgaggccggtgccaatgaacgcaatgtggcaatgagcgccaccgaaaccatcgccgtcaacgagcgcgtgcttggagcggacccgatggtcgagctcaagccggccgttagcgagcccaacagccccgattatcaagccgaacagccgggtggcatcggcgaagaggacatcatcaccctcgtgctgccatatgtcgccaccgctcgtgaaggcgtcgctcggttgggcgagctgcttgaaacttatggcacctacgaatcgaacggcgtaatcatttctgacgtagatgagatttggtacgtcgaaactatcggcggccaccattggatcgcccgccgcgtgcccgatgattgctacgccaccatccccaaccagctcggtatcgatgatttcgacctcgcggacgcattcggcgaacggcgtgaatacatgtgcagcgccgacctgcgcgagttcatggcggtgcatcacctcgaccgcacgatgggtgcgacgtcgggccgtttcaacccgcgtaaggccttcggcgccgccactgccaaagaccatatttacaacacgcctcgcgcttggtacatgcagcgtcatctcaacccgagtgaggactgggattcgccgtccgcccgccatacgcctgaatccgatgacattccgtggtgtcgcgtaccggaagacaaggtgagccttgaggacgtcgatttcctgctgtcctcgcacttcgaaggcacgccatacgacccgtatggtacgaccggtacgccggaatcgcgccaccgttaccgtccgattggtgtgaaccgcaccggccatatggtggcgattcagattcgtccgtatgtgtcggctgtcaatcgcacggtgatgtgggtgtcattcggttccggcccgttcactgctgctgcgccgttctacgcaaacgtcaacgatacgcctgcctacctgcgtgacaccacgcccgaagtctccactggcaacctgtattggacgaaccgcctgatcgccgttgtggccgacgcgcactggtatgagacgaaccggttcatcgagggctatgccgagggtgtgcgcgcgttcggtcaccagcttgtcgaacgtacggatgcttcgttggccgctggcggtgaggtcgcgcacgatgtgccgaccgtgttggagcaggccaacgacgacatggccgactacctgcacgaacacacgaccaagctgctgaacgacgtgctgtacacctccagcaacttgatgcacaacagtttcgcaatgtccgaccgctgggccgagtagcaaaacatcggttggtaatagttatgccccctgcttggtgtgtcagcggggggcaaaccttggcctagttgaagccgacgatccgctcggcgatgagatagccgttgcgcacgatccaacggccgggtttgccgggcaaattgagcgcgcgggacatcagtttggcgcgcacatccttgccgatggccggtgaatgggcgtcaatcgcgtcccacagctcggttttcttaacataattggccggatcgcgcgaaaggatcaggaacgccgaggtcacgcatgactcgattgccaggaagtgaatcatgtaccggtacaggccttccggcactgtgccgcgttcgggcgtggcctcggtcatcaaccggttgacgagccgcagctggtccacgcggcgaatcatcacgtcggtctgcacgctctggccctcacgcccgatgaagtagtgatagaacggcacatcgagatactggatgcgcttcacccacgggaacggctggtacgagtaatagaaatcgacgtagaacgtgtgctcgggcaactgcagcccggaatcgcgcaccacctgcgtgcggaaagtgagcgcatgcatgatgatgtactgagccaggccgaacttgcccagatcatcccagccgagcatgcggccggtctccatcacatgacggaagttcaccacgatcttgtggcgcttggtcactttgtcatacacatagttggtcaccagcatgtcgatcggctcgctggcctcacgttgcgcgcgcaacgtggccagaaccgtgtcgatggcctgcgggtcgacccaatcgtccgcatccaccaccttgacatacatgccggtcgccgccgcgataccggtgttcaccgcgccgccgtgacccttgttctcctgatgaatcgcccgcacgacgcctggattggtgcgttccagcttacgcgcgtactccaacgtgccgtctttcgaaccgtcgtccacaatcagcacttcgaggtcgcgggtgtcgctcgccgaaagcagcgagttcacgcaacggtcgagataggactccatattgtatgcggggatcacaaaggtgagcgtctttgccgtgttggccatgaaagtcttacgtcctcacatatttagtcgttctgttcagtttcctgttcaaaccgtagcacttcggcttccggctcggcagagtgttgcgcaacctgcttccctgaactcacattctgcaaccctgaatcttccctgagcgtgtggtcgaggtccgtctgctctaagggcgatgatgcctcgccgtccggggccggtgtttcggcatcgatcccgcgcttggcccggcgctcggcctccttccgggccttgacgccttcaaacaacagctgcggcttggaatcgagccggctcaggccgtgccatgccaggtccacgatgtacgcggccagctgctccttgctcaccttgggccggtcggcccagtactggccggtgaacacggtcatgcccaccagcatctgtgcgtagtatggcacgcccttaacggagagcttctgccgtttgaatgtttcggaaagaatatcttcaacgcgcacggcgatatcgcccaacagcgagctgaacgagccggatggatcggtgctgggcgagtcgcgtaccagcacctggaatccttcggcgttctcctcaatataggtgagcaatgccagtgccgtacgttccacaatctggcgcggatttacggtcgggtcatccaatgcggcttccagcacactggtcagcgctcgcatctcacgatccacgattacggcgtacaggccttccttgccgccgaagtgctcgtacacaatcggtttggacaccttggcgtgtgccgcaatctcctcgacgctcactgcctcgaagcctttggcggcaaataatgcccgcccgatttcaatcagctgttcgcgccgctgcagcgatgtcatgcgtgaagaatgtgccataaaactccagcttagtcggcggctggaatcggcggggattccgtctgcgggctagacttggcagatatggatatgaatactgtgctcgccattgctggcgtgattgtggtggcgattgtcgtaatcgccctgagtgtgtggctgggcaagtcccgcaagcgcgatttggatcgtgcgatgggcaagactgctcccgatgataagcgcacccgcgatgccaaggccgctgccgatgcgcgactgacagcggaagctgaggctgccaaagagagcgagaaagccggaggtgctgcggccggtaccgctgcgacgggcaagtccactgcggacgccgaatccgttagccctgctgccaagccggctgcggccgagtccacacccgaacccgccaagacggaaactccggaatcagtcggctcccgcctgacccggctcaaggccaagctcgccaaatccggcaatccctttggcaaagcgctgttcgacattttggccaaggacaacctgtctgagtctgattgggaggatgtcgaagacacactgctgctggcggacgtcggcgccgagacctccgcgcaactggtcgacgatctgaaaaccgatgcccgcatcacgggcaaggccgaccccgccgaggtgcgagccacgttgaaggacaagttgcttgacctggttggccgtgacacggatcgtcgcctcaatgttgagaagccgggtgccaacaagcccggtgtcatcatcatggtcggcgttaatggcactggtaaaaccaccacggctggcaagttggcacgactgttcgtatctgaagacaagcaggttatcatgggcgccgccgacaccttccgtgccgctgccgccgatcagcttgagacatggggcgcgcgcgtcaacgtaccggtagtccgcgccgacaaggacggtgccgatccggcgtccgtcgcgtttgaggcatccgccaaagccaaggaagcgaatgcggatgtgctcatcatcgacactgcaggccgtctgcagaacaaggcgaacctgatggacgagctcggcaaaatccgtcgtgtcactgagaagaacctgccggtggacgaggtgctgctcgtgcttgatgccaccaccggtcagaacggtatggctcaggccaaggtgttcgccgaagccatcggcattaccggtgtggtgctttccaagctcgatggctccgccaagggcggcattgtgatcagcgtgcagaaggagctcggcgtgccggtcaagcttgtgggtcttggcgagggcccggacgatctggcgccgttcgatcccgaaggcttcgtagacggcattcttgcgtaagccaacgtccacgttgtgagagcgcaaaacgcgcgacttacctataaaccaagccccgaatcatgctcgaaacatggtcggggcttcgtcatatccgttggaatcgcgccaaaatttccccgaacggtcgcacgtacgcttccagccacgcttaacaatcgcgtaacttgtcgtaacgaaaccaaaacgcgaccggctttaactgacgaactgttagcccccacaagggggacggcattgtagagacaaagtcgacgccggctgcgcaaagcccccggtgccctgaacgaaagagagggaggtagacatgggagcgattgattccggtaacaccgcatggatcctgacatccgcgtccttggttttcctcatgacgcctggtgtggcgttcttctacggcggtatggttcgtgctaaggccgtcctgaacatgctgatgcttgaggcggctgccttgtcagtcaccatgattatctggaccctgtggggttggtcgattgcttacgccggttccgacatcggcggcgtcttcggcgatccggccagcggcttcctgctgaaggactccatggtggctcaggatggcgtgtttaccgccaccggtctgaacggcaacaactacccggtttccgtggacgttgccttccaggtcgctttcgcgatgattaccgtcggcctgatctgcggcgccatcgccgagcgtgtgaagtacagcacctggatgatcttcgtggcgctgtgggtcactttcgactacgctccgatggcccacatggtctggaacggcggtctgctgtctgctgacggcgccatctccaaggccatcggcgccgccgcccacgatttcgcaggtggtacggtcgtccacatcaacgccgcagttgccgccctgattatcgtgctcatcatcggcaagcgtaagggcttcggcactcagccgttccgtccgcacaacgtgccgttcgtgatgctcggtgccttcctgctgtggttcggctggttcggcttcaacgccggttccgccttcgccgccaacggcacggctggttacgcttgggtttccacttccgctgctaccgccgccgcaatgctttcgtggggcttcaccgagaagattcgctccggtcactacaccgctatgggtgccgcctcgggtatggtcgccggtctggttgccatcaccccggccgccgatgtggtttccccgctgtgggccatcgtgatgggcgccatcgctggtgttctgacctgcctggcctgcggtctcaagttcaagttcggttacgatgactccctcgacgtcgtcggcgtgcatggcgttggtggtttcaccggcactatcctcatcggcttcttcggtgaaggcactggtctgctggctggtggcgactggaagcagcttgtcgttcagctggtcatcgctctcgtcgccatcctctactccgcagtgatcaccgcgatcatcgccttcgctctggagaagaccatcggctggcgcgtcaccgaagcccaggaagtcggcggcatcgaccttgccgaccagggtgaacgtgcttacgattttgctggtactgccagctccgttctcaaggaggtgaagtgaaatgaagctgatcaccgctatcattcagcctcataagctcgatgacgtcaaggaggccctcgcggccgccggtgtgcacggtctgaccgtgtccgaggctaacggctacggccgtcagcgcggtcacactgaggtctaccgtggcgccgaatacaccgtggatttgattccgaagattcgcattgaggtgctggccgatgacgccgacgccgagacgctggtcggtgtgatcgttaagtccgctggctccggcaccatcggagacggcaaggtgtgggtcgctccgcttgactccgtgacccgcgtgcgtaccggcgagaccggttccgccgcaatctgatcaggcgtccgttcccctgagagaggttcgggctatcaaatagacagatccccgcactctgccgtatggccgtgcggggatttttgtggtggttggggtacttgggcttcaaggggctgattcatcccgttccggaggtctacttccgtttcaaggggctgttggtgaagtatccgcgctctgaaaatggcggaatgacgtagagctcgatctccgaataagctgtatacgaattggtggcagccccttgaagcggagatagacctccgggaaacgacaaatcagccccttgaaacgcgaaatgacataatcgtcgatgaaagatggagcgatggcgtcagcagtagatggcttgaagcaacgattcatggatatgagccagccggatgacgctggcatctaccggaatggttcagccaagcgtaaggcccgcacggaattggccatgcagtgcctcaccgagttatggcaagaagcctgcaaaggtgtttcattcagcgtgcccgattccggtatcggcttcgctgcggtcggttccctcgcccgagggcagctcggccccagctcggaccttgacctggtcatcatctatgagccccgcgccctcaacgaccagcaactcaatgaactggccaataaactttggtaccccctgtgggatagcggcttggacctcgaccattcgattcgcacccgcgcccagtgcgaggaggtcactgatcatgacctgcccgccgccatggggtggcttgatgtcaaacctatcgccggagatacggaactgatacagaccactgccacctccatcttggaacgatggcgcaaggccgcgcgcaagaggctgcccgagctgctcgactcggctaaatctcgactggacgagttcggccgtcttcaatacatcaatcagcccgatatcaaagaggcccgcggaggcttgcgtgattcggtgctggtctccgcgcttgccgcttcatggctggccgaccgcccgcatggcatctacgatgaggccgttgaacgcttgcttgacgttcgcgattgcattcatctggcggccgggaaagacaccaatctgctgcttacgccgtatcaggccaaggtggctgccatgttgggccttgccgatccgacgtggccggagaacgagcgtgccgcctattccattgacgatctgcagacgctgctcgcccgcataggccggcgcatttccttttcgctggattccaccgcttcgcgtgccgaacattcgctcacccatgaaaagccgcgattcgcgttcttccagatgttctcgcagcgcgcaggcggcaggcgcgaggccccgcaattcgatgtggtggctcccggtgtggccaaacatgagggcgaactggtgttggcccccggcgtcgatcctgccaagaatgcgacattggcgctgcgcgcggctgtggcgtccggagaatttgggctgcccatcaacccgtccacactcgtcaacctcaaaaactgtccgattcatgacaaccaatgggatgatgagtcgcgcgaactgttcgtccggctgctggcctgtgggcctgagttgttggatgtgtgggagagcattgactttgtggatattcccggccggtggatgcccgaatggctcggcatccgcaatcgtccttccgcttcggccgcccaccggtacaccatcgaccggcatatggtggaggtcgcgtcgcggctgacccgcgagacgccgtccggcagccgatatgacgacgaccatttcaaggcattgcttctggcgggcatcacccacgatatcggcaagcgagcattcgtgcgcgatcatgccgccgaaggagctcgccatgtaccggtgattctcaaacgtatggggtatgcgtcggagattatcgattgggtcaccgtgctggtacgtgagcatctgacactatccgaatatgccacaggcaaggatcccaacgatccagccgtggctgaggaactggccgaccgtctgcaccataacaagctcttgcttgatatgctgttcgatctgacccgtgctgatggctcgtcgttgggtgccaccgccggcgagagcatcaccaaacaatacggctggtccaagtggcgtgaacagattgtgcatggcatgtacgcagccgtgcgcgccgcgatgtagcaatccaagtcccctctgacgaggggactcccggcgcagccgggtgggggagagaagtgcggccgtgattgttgtgaactacttcatccagacgtccgaccgcacgcgcagtccgttgaacaggcctcgtccgcccatcagcaccacgttgaacgctgcccaaagcatcgcggtccgtgacagatcgttaggcattatcggtgtcacgatactggccaacaccagtatcagggcaatatagaccacagcagtcaatgtgcaggtgccggccagatagcggtaatcgcgcgcaccaatcagaatgccgtcaatcgccatcatccagccttgtaaggggaagaacacgcccatagccaccatgccaacggcaatcagtatctgaacatgcggcgtgggggagaacaggtgtccggcaaatagtccgactattgcaaagaccacaccgatgattgcgccggtcaccagtcctgcacgcccggttgctcgggtcaattgacgggctcggcttacgctgcccgcacccaatgcggtggccacaagcgtttgcccggcaatacccactgaatccagcatgttcatcgcgaaattccaagaggagttcaccgcttgaaaaccggcgagcacagaggtacccatgcgcgccgcgcaggcgacggtagccaccatcgccgcgcgaatcgccagcgtgcggatgaacaatggtagtccgtcgccgcctgctgcagcgatgccggcaatccgcggtctgaggctcgctccgtccgcgcgcgcccagagaatggccggcgcgaccagaaacagtcccatataccattgcgctatcagggtcgctatgcccgagccggcaataccccagtgcagcacgattacgaacagcacatcaagtaccgcgttcattacggcgccactcaccgccgcaatcagggtgatgcgcactttctgcaatccgcggaagatgccgttcgctgcgtataccagcaacatgccaggggcacccagcacaatagcgcgtgtataggcgaccgcctggtccaaaacagcacctttcccgcccagcgcctggcataacggctcggctccggcgaataggccaagactcagcacgatgccgatgcccaaagccagccaaagtccgtcgataccggcctgcaagccttcgcggcggtgccccgcaccgagcagatgcgccacttgtgctgtggtcgagtaggccagaaaaacacatagcccaacggcggtcagaatgatggtggagccgatggaaagacccgcaagcgccgtgtctccaatatggccaacgatggccgtgtcgataagcacaaaggtcggttcggcgatgagctgaccaaaggtaggcaatgccagcgcgatgatgcggcgattggcggttcggctattgccgtcggcggaggaaggatctatgtgcacgctcacacgcataccatgcattgtttcatcgcgcaagcagctttaaggactacatcaagttatcccccctttgtccaccaagttatcccccatgtgtggataactcagtggattatccccaaagttatcccccaaatgtggataacttttttctctatccacatttcagcttccgcgtgttgccgcgatgtctcattgatgaataactgctgaattggttgtgcataaaaacgcataagcacataccaatatgtaagtcatcgcatcttccctttttgcggtggcgaaatacggagtggaggcttctaggggcggtatcttctggcgctcgcatattcacgtaattacttcgttaccgtacgatatcttccgtcgggcgctgctctctctatacttggtggctatggcagaaggaaacgacacttcatatcaaggcggttactcgggcggcgccagctatcagggcggcgccgatcgtggcagccgtagcggggtatccggggcgacagctgctggcgacccgatttttgaccgcgtgccgccgcatgacgacgacgcggaaatggccgtgctcggcggcatgctgatgagcaaggatgccatcggcgaggtgtcgcagaccatcgatgtgaccgacttctaccagccgaagcatcagacgatatataacgccatcattgatctgttctccgccagccagccggtggatgtggtgcttgtggccaaccagctgcttgccgatggcaatcttgagaaagttggcggcgcggattatctgcatagtctggtggcctccgtccctaccgctgctaacgccatgtattacgccgaaatcgtccaccaaagggcgattctgcgtaacgtgattgctgccggcaccaagattgcacagctcggctactctgccgaaggctcacaggcagaggatgtggtcaatcttgcccagtccgaaatctatgagatgtccatgggcaaggtccgtcaggactatgccgccatcggcccggtggtgcatgacgcgctcgaccagttggacaaactgcagaacggtctgatccagaagggcgtgccgaccggcttccgagacatcgatgacgtaacccaaggtctgcagcccggacagatgatcgtcgtcgcaggacgtccggccatgggcaagtccacgcttggcatcgacttcgcccgtgccgcagcgctgcatcacaacatgacttccgtggtattcagcctcgagatgagcaaggtggagcttgctcagcgcattatctccgccgagaccaatattccgatggccgccttgcgtcgcgcggacgatatcacgcccgaacgctggaacacgttgaacactttctggaacaagatgcaaaacgcgccgttcttcattgacgacagcccgaacatgagcctcatggagatccgtgcgaagtgccgccgactcaagcagaccaatgacttgaagctcgtggtcatcgactacctgcagctcatgacctcgggtaaagccgtggaatcccgccagcaggaggtttccgaattttcccgtgccctgaagctcttggccaaggaactcgaagtgccggttgtggccttgtcccagctgaaccgtggcccggaaatgcgtaacgacaagaagccgcagctctccgatttgcgtgaatccggttcgatcgaacaggacgccgacgtggtgttcctggtgcaccgcccggacttctatgacaaggaagaccgtcccggtgaggccgacatcatcatggccaagcaccgtaacggtccgaccgagaccttccacctcgccttccttggcgccacgtccaagttcaaggacatgccgcaggattacaacgccaatcagggggtgtgatcatgtttgccaccgtggctgtaggccgattgattcgcttcgcttcccgcatcaccaaacatggtggttcggcgttgccaggcaaggtcgtggagaaaatcgaccccggattcttgtctcgcacactggatcagctgccgctcggcgtggtactggtttctggcacgaacggcaagaccaccaccacccgcatggtcgcttcgatgctttctgatttgggattgaaggtattcaccaatcccaccggctcgaacttcgtgcgtggcgtggtctccgcgttgctcaccgaggtgaatcttgccggcaaactggacgccgacatcgccgtgctggaattggatgaggcgtatgccgtgcatttcgtgaagcaggtcaagccccgttatgccctattgctcaacgtgatgcgcgaccagcttgaccgcttcggcgaaatcgacacgactgcccacctgttaagccatgtggctgaagctaccaccggaaccgtggtgctcaaccgcgaggatccgcgtattgcagcgctcgctgccaaagtgccagccggcactgcggtgcgctacttcggtcttacggacgatttgaagcacttcttcccgtccgatgacgatatggccacgacggtaagtgcggaaacgacaaccacccccagtccgactgtgtcggacagcccccgccagcgggggcgggaagatggcttcccgctggcgggaggtggcgcgtcagcgccggaaggcggtcagcatgaccttcccgccgacgtgaccctcaccgcggttggtgaccaccgtgccaccttccacatggacggccaagactacgccaccgatgtcaaactcgaaggcgtctacaatctctacaacgccgcagccgcactggctgtggcccgtgcggtaatgcaagacaacactgctgccgccaaaaccgtagcctcaaccaatgcctgtgccgtatccgcagacgatctcatcgccgcggtttcccgcgtcaccccggcattcgggcgcggcgaggtcatcgatgtgaacggatccccggtcgagctactgctggtcaaaaatccaatgggcttccgtctctcgctggccagcttcagtccggccggcgcggacaccatgatcgccatcaacgacgaatatgcggacggacgcgacatgagctggctgtgggatgtggactttacctcactgcgcgagtccggtgtaaacatggtctccggcgtgcgcgcttgggatatggcattgcgactgggctacgaccaagtgccggtcgccaatacgaacaccgacctcgagcaggctgtcaccgcattcgtgaacaccaaccccggcaaacgcaaacacgtctactgcacgtacaccgccatgctcaaggcccgagcagtactgggccgcatcaccgaagtgcgagacgcaggcgtaggcaagtaaccaccctccggcgcttcgcgccacctcccgccagcgggagagtagaaatagcccggatcgggaactctccacttcccaccggcggggatatcgacaaggagaacgcgacatgagcaagataatcgacatcatgtccctgtacccgaaggacatgaacatctacggtgactcgggcaatgtgctgactgtcagccgtcgactgagcctgtacggttatgagccggttattcaccaatacaatcagggtgatgactggccggaacatgtcgatctcattctgggcggtggtggtcaggacaccggtcaaaagaagattattgatgacttctacatgcgtgccgacctgctgcgctcgctggccgcagacggtacccctatgcttatgatttgcggcttgtaccagctgttcggcgaatacttcgaaaccgtggacggtacccgactggacggcatcggcgtcatcggtgcctacaccgtaggccaggacgtgcgcatgattggcaatctggttgagcactctgatcaattcggcgatgtgattggttacgaaaaccactccggccagacattcctgcgcgacggcgtacagccgctcggcacggtcgatcaggatggccgtggcaacaacggcgaagaccataccgagggcgcgcgcgtgcacaacgtgatcggcacctacatgcacggctcgttgctgcctaaaaaccccgccatcagcgatttccttatcgaaaccgccgtgactcgtcattacggtacgttcgatacgtccgatcagacccccgaacagtccaaggaactcgcccggctcgatcaagtggccaccaacgcgcgcaaggctgccgccgaacgtcctcggtgaattctcggtgaggcctcggtaagtaccaatcagcgaaaaaccagccgaaatcagtctgagggtctagtacattgccctgctgtttgcgctaggcttggtggtacgagacatggcaccaggccatgtcggacctcgaaggaggggtatcatggctgattttgatttgggcgatggcctgcgcaaggtcctgctggcgggcatcggtgcccttgccaccggatacgagaagagcagcgagcttgtcgatgagctcgtcaagaagggcgagatcaccgttgagcagggcaaggccctgaacaccgagctcaagcgcaaggtgagcgagacggtggatgacgtcaagaaggccgctgccgaagccggcgacaaagctgctgccgcagccgacaccagcgccgccgacaagcccgctgacgagggcaaggccgagtgaccaagcccacacgcactacgccggaatcagagtcgaccccgctttccagcagggtcgaccctattctgacgcctgcgaaagccgaacgtgaggcggcagcgaaccgatccgccgacacgtcggacacgctcaagcggaccgttgacaaggcgacccccagcgtatccgacgaaacgctggcattgttcggacgcaggaacgatttcgccacgcgctaccatctgacgcgccgtggcaagatcaaacgactcgggcagatcaccagaattgtcgagcaatttgacgtgctgcacggcctgactccggtcaaaatgcgcctcatgttcgaggcgctcggccccacgttcgtcaaagtgggccagattctgtcgatgcgctccgagattctgccgcaaagcttctgcgacgaactcgccaaactgcgcgccgacgccgacccgatgccgtattccacggtgttggatgtgcttgccgccgaatacgggcgtcccgccgacgaggtgttcgcgcatatcgaccccaagccgttgggctctgcttcactggcgcaagtgcatcgcgccacgttgaaaaccggcgaagatgtggccattaaagtgcagcgcccgggtgtgcgcgaaaccatggcccaggacgtctccatcatgcgctccatagccaaggccgccactaaggtgattcgcacctcacagatcgtggacctgaagggcgtggtcgaggagctgtgggacaccttcgaatcggagactgactttctgatcgaggcccgcaatctcgccgaattcaagcgcttctccgtccgattcaaatacatggactgcccgacggtgtacgccgaactatgcaccgagcatgtggtggtcatggagtacatcgacggcatctccgtctcccacccgggccagctcatcgacgccggttatgacttgaaggagatcggcaccaagctcgtcgacaattacgccacacagattctcgacgacggcttcttccacgccgacccacatcccggcaatatcctcatccggggcggccagattgtacttatcgacctcggtatgaccggtcggctcgaccagcgcacccgtacagtcctcaaagaaatgattttcgccgtcgccaaacaggattcgcccgctctggccgaggggctgctgcgattcgccggcaccgaggccgatccggaggactatcccgcgctgttggccgatttggacgtgatcgtcaaggaattcggcaccgtggatttggccgaactggacatcgccgccttcctgaccgcgctgacgcagatggccggccgccacaacattgaggtgcccagtacggtgaccaccatcggccgcgcgttggttacgctcgaaggcttgctggacgagttcattcctgatgtgaatatgatcgaaatcatttccgaccatatcgccacgtcgaaatcgctgaagaacgccaccaaagacgagatcaagtcgctgggcgttgaggggcatcaggctttgcatgccacgctcagcactatgaccgaactcaagaccgtggcccgtatgctgacccgtggtcagttgcgtgtcaacatggaactggtcggctccgaagagccgttccagctgctttcggatatggtgaatcgtctgacgatggccctgattgtggtcggtttgttcgttggctcgtcgattgtctactacgccggcatgaagccgattatcttcggcattccggtcatcggcttcatgggctacgtcgtggccttcgccctcggcgtatggatcgtcatcgacatctacttaaagggccgcaaaaccaagaagcggtagggtatcgattgatatcagtccagcgggagggtggattcgcgctggataaggtggcagggtacgtagtcgacaccgtgatgcgggttgccgtcgatggcatcgaccaagtatcatgccgcacgccgtccgatagtttcggtttcgttgtcgattgacgtcagtgcgggccccgagttggaggtcagtaccgaccagttatcgtcggccgataacggcgacgtcatccggaatgcgtagatcctgctgcttgagcacgtcaatgcagcctcgggccagctggtcgttttggcagaccacagcgtcaaacgtgacgccctgatcgagcagcaggcgggtggcggcgcggccccaactctcatcccacttgccataccggattggtccggccggttcgatgcccagctcagccagtgcctcgagcgcacccttggtgcggtcggtggcaacggtataggtttcgccgccgccgataatggcgatgtgccggcgaccgcaagaaatgagatggttgatggccatgcaaccggcgtccacattgtcacaggtgaccgaacgatcttcggtatcggtggaggggccgtagacgtagaccagtggcacgccccagtcatggccaagcgtgggccgggggttggtttcgcgctgcacgatgagtagaccgtcgaccttgagggaccgcagtttctcgacatgctgacgttccagcgcggcgtcgcgaccagatcgtcgaatccgtcatcccctaccagtggtgagtgatgaacgacgaaatcgacaccacagtgcctgacgacccggctggcaaccagctggctgacaacaaaagccacgcggtcgccaatctgaaggttgtcgccggcgaattggacgacgaattccacggcatggtgttccaggatttcgacgtctacaagtggcttgaggaagtcgcttatgcgctggcctaccatccggatcccgaactcaaggcgctgtgcgatcgcacggtcaatctcatcgcccgcgctcagcagccggacggctacttggacactccgtatcaggtcaagtccggcgtatgggccgaccgtccgcgcttcagcctgattcagcagagccgcgagatgtatgtgacgggtcactacatcgaggccgccgtcgcctaccatcaggtgaccggcaatgagcaggcccttgaggtcgccaagaagatggccgactgtctggacgccaacttcggccccgaagaaggcaagattcacggtgccgacggccacccggagattgagctcgcccttcatgggccaaccgcgaggtcggccagatgagggtctggctcagacgataattcttacccctctattctccttccattgggtgagcctcccactgttgaacagcggcgggaggctttctcatatgcggggtatgatggggtgtcgattcactggggagagcaataatgacggcatatatggatcacaaggacctcgccaacgaggtcatcgatcaatcgcgggcacaggagatcacggacggcgtgcatcgggtgcttgattgtatcgctgcggccgaatccatggccgggcgggaagctggttcggtgcagctcttggccgccaccaaaacgcgtgacgttggcgagattatggccgcgattggtgccggtatccatctcatcggcgagaatcggccgcaggaggttacggtcaaggctccgggattgacgcgcttgctttcggagcgtggaatgtcgttgggcgtgattggcgaggctggggctttcaacggcgcagcggcgtctggcgctgcgaacggcgtcggtgattccgattcgactgatgcatcggccaatgccgcgaatcatattccgttccatctcatcggccaattgcaggccaataaaatcggcaaagtgctaccggtggtgaacaccatcgaatcggtggattccattgaactggcggagaagattgcgcgccgcgccaccatgcgcggcatcacggtcggagtgctgctggaggtcaacgaatccggcgaggaatccaagtcggggtgtgctccgagccatgccatcgatttggcgcagcgtatcggtgccatgggcggccttgaattgcagggactgatgaccatcggcgcccatgtggacgacgaacgtgccattcgtgcgggctttgcgcatctgcgccgtacccgtgaccagatcctggcctccggtgcagaaggcactgccagctgtaaggagctttccatgggcatgacccacgatatggcctatgccatcgaagagggctccaccatcgtgcgcgtcggcaccggcatcttcggcgaacgcgcctttatctgaggtattcctagttttatttgtctgttagcgacagaattttaggaaagaatcggcttcgtcctgaaatcctgtcgctgacttcgtcttagtgacaggatttccggaaatgagtcctatcttcctaaaatcctgtcgctcagttgtgctcagtgacaggatttcaggaagagtgggctcatttcctaaatttctgtcgctaagaggagctggtaatacaaataaggtgtcgcgatacatagaaaaggtcgtcgcaatcaagtgacgaccttatgaatatcgaaatagagcaatcacgcgtagatattgcgcggacgcatgtcctcgggaagcccctccagcagaatcgccacggaaccttcctcgaacacggaacggataccggcggccagcagaggcgcgcaagacagcacggtcatattcggcagacgcttttcctcgggaatcggcacggtatccatgaacacgatttcatgagcgccgcaacgagacagccgttccacagccgggccggagagcaagccatgggtggcgaccagcgtcaccgacttggcgccggattcgttcagggtgcgcacggcctcgcaaatagtgccggcggtgtcgaccatatcgtcgatcaccacacaatcgcgaccgtcaacatcaccgatgatgccgtgtgcctcagcgtggttcggacgggtgatgtcgcgctgcttatggataaaggccagcggcaggttgcccaacttggcggcccactgctcggacaccttgatacggccggcatcaggggagacgatggtggtgttgttcaggtcaatggcggaacgcacatagtcaagcagcaccggcatggcggtcagatggtcgaccgggccatcgaagaagccctgctcttgggcggcatgcagatcaaccgtcataatgcggtcagcgccggcggaacggaacaggtcaaaaatcaggcgagcggtgatgggctcgcggccgcggtgcttcttgtcttgacgagaatagccaaggaacggggccaccacggtaatcgacttggcggaggcgcgcttcaaagcgtcgatcatgatgagctgttccatgatccacttgttgatatcgcccgaatggcactgcagcacgaacacgtccgcaccgcgcaccggctcggtgaaccgcacgtacatctcaccgttggcaaagtcgtaagcggtggtctcgagaacctcagtgcccaggcattcggccactttctcggccagctcggggtaggcgcggcccgtgaccaaaacgagtcgtttatccggagtgccttcaagaattgccgacatgctttcgcatccttttgtgttgcagtgtttttagccttaaccagtgtactagcaccccaccgcagcgcgtgccgtgaagtgaggctgtgttgtaagagtgctgcaatcgttgatgaacatgcggcactgtctcgccctgaccataggataggcaagttgctcacagggtgaagtgcatctgcatcaccctatgattaacacgcatacacactcctgccacggaacgtccgtggccgaatagtccgaaggaggtgggtgatgtctgcgcacaagtacgaactgatgttcatcgccgatcctgagctggatgagcgcggtctgaagaagctgaccgagcagtatctggaactcgtcaccaaggaaggcggttctttcgatgagcccgattactggggccgtcgcaagctcgcctatgagattgccggtaagactgaaggcaactacgtcgtggtgaagtacaccgccgagcccgctaccagcgatgagcttgaccgtgttcttaacctcaacgaatccgtgatccgtacgaagattcttcgtaagggctgaattaagcgttaagtcagctgaatagctggtaagtaagaaggcaatggcatggcaggcgaaacgattattaccgtagtcggtaaccttacccgcgatcctgagctgcgtactattggcagcggttccactgtggtgaacttcaccattgcggcttccactcgtcagtacaaccgcaacacgaatcagtgggaggacggcgatacgctgttcatgaactgctcggcttgggatggtcgtacttcgtcgttggcctccaacatcgccaacagtctgtccaagggcatgcgcgttatcgcgcagggtcgcttgacccagcgttcctaccaggcccaagatggcacccagcgcacggttgttgagctgcgagtcgatgaaatcggcccgtctctgactcgtgccactgcacaggtgacccgtcagactagccagggcggcttccagggtcgttccaacggcggcttccaaggcggccagcagcccggtcagggctacggcaaccagggtggctatcagggcggttatcagggcggcgctggatattcccagcagtctgccccgtccaacccggccgcacagtccgctccggcaactgatccgtggagcaacgccggctcctctgattccggcagcttctccacgttcggcgcttcctccgatttcggtggcggcgacgattccgatccggagttctgatcgatacttacccgctgattagcagcaatcaatatcaagatttacaaggagaacatcatgtcacgtaagaggccgcaaccgccggtcaagccgttcaagaagaagccgaaccccttgaaggccgccaagatcaccgagatcgattacaaggacgttgcgctgctgcgcaagttcatctccgatcgcggcaagatccgttcccgtcgtatcaccggtgtgaccgttcaggagcagcgcgagctctcgaaggctatcaagaacgcccgcgagatggctctgctgccgtacgccacctcgggtcgctgagttagggaggctttgaacaatggctgaaactaaggttattcttactcagaccgtggccaacctgggccactccggtgacgtcgtcgacgtcaagtccggttacgctcgcaactacctgttcccgcagggcctggctttcgcctggaccaagggtgctgaggctcagattaccgctatgaagcgcgctcgtctggccaaggccgttgctacccgtgaggaagctattgccgccaaggacgctatcgagggcactaccgtcgagatcgccgccaaggtgtccgagtccggcaagctgttcggtggtatttccaacgaggctatcgccatcgctctgtccgacaaggctccggtgaacccgaagtccatcgaggtcgagaccatcaagaccaccggcgatttccccgccaaggtggccctccacccggagattaccgcttccttcttcgtgaaggtcgtggccgagtgagctattccggccttgcgctggaatctttcagactgacagtctgagcttaagcattgaaccccgtgcggcgattgccgtgcggggtttttcgtgaattgcggcaagttttttcgatggtgtgctgattgataatcggctcgtctacacgcgacacgccgaagcttgcgagagtctcagatttgagtatatttatcacctgttgcatgaaacactgcagcgtctaaccaagcccctgtagctcagttggttagagcagctgactcttaatcagcgtgtccagggttcgaatccctgcgggggcacagacaagtcggaatcggaagattccggcttttttgttttttggcttagcggcagcactgacaaggtttcgtcaaggggcaaagtgtacaatcgccacgtttgctttcgcgcccagtgaaatcgtgtcgccggctccgcgaacggattccaatcatagagaaggccgtggggcagtcatgtctgctgtgcggcgaagagaaaagaagaagcagtggaattttccctctttaccaagttggcagctgagtttttcggcactgccatcctgatgattttcggcaatggctccgtggctaacgtcgagctgaagaacaccaagggtcatcacgctggatggctgaacatcgccatgggctatggctttggtgtgatgttcccggtaatgatgttcggcggcgtttccggcgcacacatcaatccggcaatgaccctcgctcaggctatcaacggcctgttcccgtggagcgaagtgctgccgtacatcatcgcgcaattgctgggcgccgtcctgggccagttcatcgtctatctgacgtattacccgcattaccaggagacggaagacgccgatgcgattctgggcactttctgcaccaccgatgcggacaacaagaaggtcaactacttcctgaacgagatgttcggcaccctcgtgctggtgttcggcgccctgtgctgcctgtccctgccgtggggcaaggctgaccatgccgcttcttccatcgccgtcggcttcatcgtgtggggtctggtgacctccatgggcggcccgaccggccctggcctgaacccggcccgcgatctcatgccgcgtgtgctgcacgccatcctgccgattccttccaagggttcctctcgctggggcgaggcttggattccggttgtggctccgatcgtcggcgccatcatcggtgcttggatgttcgtgttcttctttgcctgatcggcattgattgacgctatatgcgaatggcctccgtctgtgtggacggaggccattcgtgtatgcaggtaaacgcgattacgaaaggaagatctgcggtgctttcgcgaagttcgtggcgcagtgctcgccgcagaagtaataggacttgccctcatactcgcgcgtgatcgcgtcatcgttcacagccacggtcatgccgcacaccggatcagtggcggtttcgccgtccgcaggggcgttgtgatgcatgtgcattcccatatccatagtgttctccttgttggttggattattggattggtcagttacgtgattgagtgaagtgcgatcgtcaacaataacggtcggctcaatagtgtttgcagtggtggttgctgcggcagaaccggtgatgtctgtggtcgtgccgccgctgatattcgccgcatgaagacgattggcgttcagcaccaggcacaccgaactcaacgccatcgccagtcccgcgatcatcgggctcaacagccatccggtgaacgggtaaagcacgccggcggcaatcggaatgccgatgatgttgtatccgaatgcccagccaagattctctcggatattgcgcatcgtggcattggacagattgatggtcctgatgacgccgcgcaggtcgccgctcatcagcgtcacgtccgccgactgcatcgccacgtccgtgccggtgccgatggcgatgccgagatccgcctgggccagcgcgggggcgtcgttgatgccgtcgcccaccatcgcaatcagagtgcgggattgcgcggccgtgcgggaggcgccatccgcggacttggcggcggcctcgtcgcgttcgcgctgcagtttggcgatccagtaggccttgccgtccggcttgacctcgcagatcaccgtatcgatgccgacctcacgggcgatgcgccctgccacttcggccttgtctcctgaaagcatcaccgtgcgtatgccgcgtgcacgcaatgctgcaatcgcttccggcgatccttccttaacggtgtcctgctcgtagctcggtttgttccaatcggcggtcgtatccaccacgccgcgcgtaatagtgccggtcttgtcgaagaccacagtgccgatgcgccgcgcctgttccagagcttttgcactggtgaccagcacgccgttggtggcgccgagccccagagacacagtgaccgagagcggggtggcaagacccagagcgcacgggcaggcgataatgagcacgctgactgcggtgatcagcgcgtgcgccagttgcggcgcagggccaagcgcaatccatatggcaaaggtccatatagcgatgaccatcactgctggcacgaaatacctggcgattctatcggccagctgctgcaccggagctttggttgcctgcgcgcgggccaccatcgccgcgatttgggagagcacagtattggcaccgacctgagtggcttgcatgacgaggtcacccttgagcaatacggttgctccggtgacggccgctccggtcgttttggtgacgggcttggattcgccggtaatcattgattcatcgatactcgcgttgccggccacgatgatgccgtctgtgggcacgcgctcgccgttcttgccgaccagcagatcgccgacggcaatcgtatcgatgtccatgtccgtgaaattcgcgggattgagccattccacgttctctggcgaagccgcattcagcttatgcgcggtgcgaggccgtagcttgattagtgattgcaccgccttgccggtgccttcgcgggccttggtctccagcagtcgaccgaccagcaccagggtgatgaccacaccgaccgattcaaaatacggctcgcgtgaaccttccggaaatacctgaggggctacacaggtcaccagcgaatagagataggcggccgatgtgcccaacgagacgagcgaattcatgtcgggggagcggtgcgccagtgcggggaatccgaccgcgtggatcgggtggccgcagtagaacatcaccggtgtgatgagaatggcctgcagccatggattcaccatccagtgcggcaccagcatcggattggccatgtgcagcatggtgacgatgaacacggggagtgtcagcactgtgccgatggccactagtcgtgtcagcgatgtgatttccttcgtacgttccgctgcctcacgtcgttctgcttctgcggagtccaccatcggggcttccgctgatgcagtgagcgggtgcggtttgtccgtgcctgcgctggcatttccttcgaccttcagcaggccgtgcaccatattcatgccgcaggcaaatggatattcaccggcgggcaatgcgggcaattccacatcggtcaccgcattgccgggcagcatggcatcgaggccgaggtcgccaaacaccacgtgagaggtgcattcaccggtctcctgccggtcgaatgtcagtgtgatcggtgtgcccgcgcgcatactcaccacggcaggggagtagccacctttgacggtgattgttgcggtctggcgcttgccggaggcgtccatggccccggatgcggccttctgctcgccgaaaaagaacctgagcaccagccatgtcaaggcggctgccgcaatcagcgccgcggcggtcgagaaaaggttgaactccatcaccgctccttcccatcagtattataccgagcaacagtgtataccctatacccctatggggtatataatggggtgtgttcagctgaaagatgagtatcaggaggcagcgatgcacgggtatgacgacgataaggccaaagtcattgcgcggctgcgccgcattgaggggcaggttcacgccattacgcagatggtggaggacgataaatactgcattgacgtgttgacgcagatttcggcatcgaattcggcgttgaagtcggtggccttgatattgctggacgatcatctgaatcactgtgtgcgccaggcggcggtgcagggcggtgaagttgccgatagcaagcttgaggaggcatccgcggccatcgcgcgcttggtgaggtcgtagttggtcgtgtgtttggctgttggccctggttgtctgtcgttatgcatgcggtgcgattgtcaatgctgacgttaggaaacaggaacatatctaccgtcggttgaagatggtggaatactgggaaccatgtttgaacaaatgggaactgtgattgtggtcatcgccgtgctggtggtcggtgcggggcttgggctttgtgccggctttttattggggcggcataaaggtcaggctatggcgcgtgatgccagggcttcggagctggaggaggccaaaagcttgctggagtcggcgcatggggagattgccgatttgaccgctcgcaatgccgcttctcaagcgcagcttgaaggtgcgaaccagcaattgacgttcgtgaagtcacagcttgctcaggcgcagcatgcggaacagattcgcatcgagcgtgagcgtgagcgcgcggccgccgaggctgaacagaagcgtaaggccgatgccgaagccgccgaagtcaagcgtgtcgagcaggaggctcgtctgaaagagcagagtaaagtgctggaagcgcttgctcctgttgccaagaatctcgattcgctccagaccaaggtcacccaaatcgaagaaggccgcaagaaagagatgggtgcgctcggggctcaactcaagggcctgaatgatcagcaggcccggttggacaaggaaacgagttcactatccgcggcactgcgcaacaataaggttcgtggtgcctggggcgaggcgcagctgaagaatattgtggagtccgcgggattgctggagcacgttgactttgacacccaagtggtggtgtccgatgccgacggtcgtatgctcaggccggatatggtggtgcatctgcccggtggcaagaccattccgattgatgccaaggtgccgtatgccgactatcagcgggcttgtgagattcccgagaccgcgggccccgaggagttggatcgtcgtaacgacctgttgcgatcccatgccaaggcgcttcgagaacacgtgcgtgcgttgggggagaaggcctattggaatgcgttccccgtcactcctgatttcgttatcgcctttattcccaatgaggcgttgttgcaggcggcgcttgaggccgatcccacgctgatggatgatgccttctcccgcaaggtggccttgacctcgccagtgaccctgtgggccgtgctgaaatcagtggcctatgcatggcagcagcaatcgctgacggatgatgccaagcagttgttcgatttgtctcgagagctgtatgagcgcttcgccgtgcttggcgactatgccaccaggctgggaacccaaatcaccaagacggtcagtgcctataacaagttcgcatccagtttggagcgacgtgtattgcccacggctcgcaaactgcaaaagctcgaacccaccaaggtgctcgaggaagtgcctcttatcgaatcagacaaaggcaatgtcagtgagttatccgcccccgaggtgacatcgtcggaggatgatgagccggtcaagctgactgcctcaggcgataggcttgaagcatgactgaatctggattccgcccgaccggcacctcggacctcaatgtttcacgcgacgcttccgcttttgccatgctggagccgcgtgagcagctggccaccctgctgaaggagcacgtggttggccgcccgttttcggaacttgcctcggtgactttcgatcatcgtgccgccacggtgatgggtcatgtgctcattgacactcttgaagatgcaggctattcggttgatgattttgacgccgttggtgccttgactgcagctgccgtacccatggtgtctgccatgattcatgctgctgcttctcgtggtgaggatctggacggattcgtaatggacttcgtgtatccctcaatcaagggtccgtctattgaaggacggcgcgtgatgctgttggatgcatggctgtccgaaaaatcgtatgtgcagaccagttcgctggttaccctgcgtaatggcaacgaactcagcctcgacttcggcgtggtcgaacaactcggcgctcaggtcgtggctattgcctcactggtcggcggtggagctaaagacatcaatgtcatcaacccctccactggcgaaagccacgtactgccattcgttcaggtctttgacgaatccgagctgaggtaattccattcgtggcttccccattcgggaggctgtcgggcgcaacgagaccgctgtggtcggcgcacgacgttgataatctccgaggagcaactgtgcacgcacccaaccagatttccttggcggcaaaagcctcgggcgaaccggaattccgtgaagtcggtcttggcccatgggctgaaacccatcccggcgaacctcgtcctgatgacttggcatcgcctaattacgatgtccgtttcgattctgctctgctcgatgagggcgatcgccgcaatgtgctcgaccgatatcgctactggactgtgcaggccatcaaagaagatctcgatgcccacggccgccacgatttcgaagtggcggtggagaactggacccacgatttcaatatcggatccatggtgcgcactgccaatgcttttcaggccaagcgcgtgcatatcgtcggcccgcataagtggaatcgcaaaggcgcgctgatgactgagctctaccagcacgttgagcatcacccctcaatcgcggagttggtggaatgctggcataatcgtatcgccggtgaaatcgctgccgaacgggcgcgggctggggcggctgccttaaaggcccatgccatcgccagtgctcataatggggcggagactggtgccggcaatgggtcggagggcatcatcggtaattccggtgcaactgtgtcctcccacgtgtcggcgctgaatgctgtttcggcagttgccgaggccactgccgaaatcgcacaggcggatgcccgcatcaaggaactggaagccgctcgcatcattgctctggacatcattccgggcgcggtgcccatggagacctatgcattccccaagcgctgtctgctgctgttcggcgccgaaggccccgggctgagcagtaaggccttggaactagccgacgacgtggtatacatttcccaatttggttcggtgcggtccattaacgctggcgccgcggcggccgtggccatgcatgcatggattgcccagcatgccgcaaccgcagtctgatggagcatagaaaagcctcgctgccatcgcaattccgcgtattatctgtggtgttgcgtcacagcaatagtccgtgaaacattttgtgaaacatcaattccccatatttcctcctgtgaaacatcgcgtgaaacgcaagccctggtggacgtgtgccgacagctctccccaatctgcccaatataggctagggtgaaagcatgattgaagttgaggagctgagcaaacgcttcaaaaccaagcaggcactagacggtgtgtcattcactgccgaagatggcaaggttacgggttttctgggaccgaatggcgcaggcaaatccaccactatgcgtgctgcgctcggactcatcagcccggataagggccgcgcgctaatcgatggcaaaccatatgtcaccttacgcgcaccaatgcgtgcggtcggtgcggtgcttgacgccaagtcagcgcataagtcgcgcactgcacgagcccatttacaggcccttgcctataccaacaacattcctaagcgtcgagtcgatgaggtcattgacatgaccggtctgcaagctgtggccaatgtcagagccggtcagttctcgctcggtatgagccagcgactgtccattgctgcggcattgctgggcaacccgcacaatctggtgttggacgagccaatcaacggtctcgatccagaaggcgttaaatgggttcgcgacttatgtcgttattacgcagctgaaggacgagccgtgctgctgagctcgcacttgatgagcgaggtggcgttgaccgcggataatctggtgattatcgggcaaggccatgtgttggaaaccaccacggtgagtgcattcgtggccgagtattcctccagatccatccgtgtggtgacaccggaacccgacaagttgcgtgcgatttttaccagtagccctgaggtcaccgtggttcccgatactcgcaaatccgatgactcgcaagtaggcgaggtatttcgtgtcaatggcgccgacttggttgcggcggcacaggcgttcgcccgggccggcctgattacttacgaattcgtcgaagagcacgcctctttggaagagtcgtatatggcgctgacccacagcagcgccgaatacctggccaaggaggtcggatgatgagctccaataccatgagaacggccacggaaaacgccaatatgaccggcagtatgagtggtgcagctgctgaaaagcatatgcctgatgcgaccggacccagccaacctgccaacgcagaggcttccggccgtcctgcctctagccgtcgtgccagcagcatgtaccgtcgtgccaagctcactgtgttcggctcgctaaaggccgaattgctgaaactgtggtcactgaactccaccaaggtgctgttgggtattgcggtcgcgctcatgctggctatgtccgcgttgagcgcttggagtgtgaccttcatggcgtctacggatttgaacactggcaagacgctggacaatcccaagcccatatccgccgcagatatgtgggcggtactggcttcttccggctcgaccgcggcgctgatcatcggcattttcggtgtgatggccatcaccagcgaatacaccacatcagccgtgcaatccagtctgacggtcaaccccaggcgcggcatgttctatgccactaagtccgtggccacggccctgtttgcgctggttgctggtattgtcggcattctgctggccgcaggtgtgctctggctattcactcgaggccatgacattacggcgctgaccagcgatcaaagtcgaatcattcctgtcacgttgatcggcttccctctgactattgtgctggtgtccctgatggcgcagggacttggcggcatgacccgttccacagtgggcggcgtatgcgcgctgatcgtgctcttcatggtgctctcgtcagtactgtccatcacatcgatggccattaaccaggtcgaatggcttggcactttgtcctatctgacaccggacaccgccatgaatcatttcctcggcgctggtatagaaagcagctcgcagtccacccttgccgcagccgttaaaccgaactactggattcccgattggtggcagtccggcctgatcctcctcgcctgggccgccgcagcatgggctggcggactcatcgtcaccaaaaaagcggacatcaagtagctatgttctctgctgcaggattatcgccgcataaagcaatcacaccttcgtgcatcagacatattctgacgattgttatcgcatcaccattgttgcgtcgggaacgccggcagcccgtagtttattgatcattggatgctgcttcaacacatcctcataagtgaaccgaactatggagtcgactttggctcgatacagtccggtttcccgctctttttccgcgtgcaccgctccttgaatacccctgcggtcattcatattcggattggtgtatttctcgtacccgtcatattcgccgacgataagacggccgtcgggcagccgccaaagataatctacccggtacagcgcgcccgtttgcgggtcggtgatgtcttgctgcaattcggggaccatgagtccgccttcaacgattgtgcctctaccgagtgattcgccgccgttttcgcttgccgggttcgcataatgaagcaagcggaatatcggcgtgcaatcgcggtgcatagtgctgcaaatactgagaatgtccgcaatggcagtacctttacgtagtgccgaatcgatgattggcaacgcgaagcgaaaatcggtagacagcccgcagtccactactgtttgtgccccattggtcacagggattccattgacatattccggtgcacaatgtggtacgaatacacgtttgatattggcattgttcgcgttggtgccttgcgacgcggtggcgatggtaacggagccggcatgaagatgccatgggtgctcgaaaccatgcagtgccgctgcggtgactccggcgaaaacccagtttggatgcttgagatggagtgtgcatgccacatgctgtatgcgttcatcgggtttgagcgcattccagtattccggtttgacatacatgttgggaaatactcgcttgagctcgagttctttggctcggcgaataagggccgagcagtgtgattttgttcggccgtaaatacatatgcctgctgcttccgcttgcgcgataagcgcatccacttctttgtgatgtttcatgaatcgaaagtatgccaatcgagaatgaagtgtccacttgttcgggcaatgtggtcgcagcttcgagcggattcgcatgtgaggattgcatagattggctatatctcgcggatgcttgcggattgaggtgtgaatcatcggcatgataattatgtatgtgcccccgttgcggcgtggaatgtggataactatttcgagtgcgttgatgcggtgcctggagaggctttcctgttcctcgcacttgccggattcggtttttggcgtttagaggggcaattggtgtttaaagaggggcaaacctgactagctcgcatttttgctccgctgagaagtcgtgagtagagcattttctcgattagatcgaggttttgcttcgctgggggacagcagcgaggtgctttcatggtcagctcgtggttttacctcgctgagtgccagtaagcgtggtttttcttcggctttgtcgtggttttgccccgcttgggatgctgggcgaggtgtcttcattggttactcgtggttttgccccgctgcgaggtgatgagtggagcggtgtcgtgatctgttggtggttttgcttcgcttgggatgatgagggaggtgctttcgttggttattcgcgattttgcttcgttgaagggttgtgagtgagtcgtttccattagttactcgtggttttgccccgctgaggggtgatgagtggggtggttgtgcggttggctggtgggtttgccccgttgggagctctcgaattggtggtggaacccgtgaagggctggcgcattgttccaatgggcgggaaaacgaggctttccgataactgcgtgtcacatacggctcatatagttatggccatgccaacattttcacgcgaagaaatcgtgcatttgggcgatctggcccgaatcgcgctcaccgatgaggaaatcacccgtctgcagggcgaactgaacgtcatcgcagactccatcaacaaggtccaggaagtcgcctccgacgatgtgccgccgaccgccaacccggttccgctggaagcctacctgcgcccggacgtcgccgaaaccccgctcacgcaggaagaggcgctcgccggtggcccgaagaccgaggccggcatgttcgtggcaccgcgaatcctgggaagcgaggagtaatcgatgagcaacgaaaccgcaacactcgtcaaactgtccgccactgagcaggctgctgccatcaagaagggtgatgtcacctcccacgagctcgtcgaagcccatctcaaggtgattgaggccgccgagccgtccatcaaggccttcctgaaggtctccggcgatgtggccctcgagcaggccgacgccttcgacgccaagtccgcagaagacaaggccgccctgcccgagctggccggcgtgccgatcgccatcaaggacatgatcgtcaccaagggcatcgagaccaccgccgcttccaagattctcgaaggctgggtgccgccgtacgacgccactgtcatcgaaaagctcaaggccgccggcatgccaattctcggcaagaccaaccttgacgaattcgcacagggctcctccaccgagcactccgcctaccaaaccacccacaacccgtgggataccgagcgcgtgcccggcggctccggcggtggctccgcttccgcagtcgccgcattcgaggccccgctggctctcggcaccgacaccggtggttcgattcgtcagcccggcgctctgaccggcaccgtgggcgtcaagcccacctacggcggcgtctcccgttacggcgccatcgccatggcctcctcgctcgaccagatcggcccggtctcccgcaccgtgctcgactccgccctgctgcaggagattatcggtggccacgacaagcgtgattccacctccattcccgaaggcccgcgcccgatggtcgccgccgcccgcgaaggcgccaagcgtgacctcaagggcatgaaggtcggcctcatcaaggaactcggtggcgacggcttccagcccggcgtcgaggcccgcttcaacgaggccgtcgacaagctcaaggaaatgggcgccgaggtcgttgaggtctcctgcccgcacatcggctactcgctgggtgcctactacatcatcatgccgtccgaggtcagctccaacctggcccgctacgacggcatgcgctacggcctgcgcgtcatgccgccgaccggcgtgccgcaaaccgccgccaacatgatggcctacacccgtgaagccggcttcggcgacgaggtcaagcgccgtatcatcctcggcacctacgccctgtccgccggctactacgacgcctggtacggctcggctcagaaggttcgtacgctgatcatcgaagacttcaagaaggctttcgagaaggccgacgtgctcgtggctcccaccagcccgtccaccgccttcaagttcggcgaaaagatggacgacccgctggccatgtacatgaacgacatcgccacgattccggccaaccttgccggtatgcccgccatgtccatcccggccggcctgtctgatgacggcctgcccgtcggcttccagttcatcgccccgcagcagcgcgacgaagtcatgtacaagccggcggcggccctggaagccgcgctggaggacggctggaacggcccgatctggaaagacctcaagaccccgtggcttgacggtctgggcaagtgagcatcggaaggaaagaaacacatcatggctgaaaaactgatgaaatacgccgatgccaccaagaagtacgatgtggtcttcggtctggaaacccacgtggagctgtccacgaacaccaagctgttctgcccggcccacatcgagttcggcggcgagccgaacaccgaactgaccccggtgagcctcggtctgccgggaagcctgccggtgatcaacaagaccgccgtcgattacgccatcaagctgggccttgccctgcactgcgaaatcgctgagtggagccagttcgcccgcaagaactacttctacccggacatgccgcgcgactatcagatctcgcagtacgacaagcccaccaacggcaacggctatctggacgtcgagctggaggacggcaccgtctttcgtgtgccgatcgagcgcgcccacatcgaggacgacgccggcaagaacacccacgtaggtggcgccgacggccgtatcgagggtgccgaccactcgctggtcgactacaaccgcgctggtgtgccgctgatcgagattgtgaccaagccgatcgagggtgcgggcgaccgcgctcccgaaatcgctggtgcttatgttcgcgctatccgcgacatcgtgcgcgcgctgaacatctcccacgcccgcatggaacagggcaacatgcgcgccgacgtgaacgtttcgctgcgcccgagcgccgatgccccgtacggtatccgttccgaaaccaagaacgtgaactcgttccgtggcatcgagaagaccattcagtacgagattcgccgtcaggccgcgcgcctcgacgaaggcaaggagattctgcaggagacccgccactgggatgaggctacgcagaccaccgctggcggccgtctgaagtccgatgccgacgactaccgttacttcccggaccccgacctcgtcatgctccacatcaccaaggagcacatcgaggagatgaaggcccagatgccggaaatgccgcgcgagcgccgcaaccgcctcaagtccgagtggggcctgagcgatctgcagatgcgcgacatcctcaacgccgacgccctcgacctgattgaggaaaccgtcaaggccggtgccaaggctgccggtgcccgcaagtggtggctgggcgagctctcccgcgaagccaacgccaagggtgtgtccctcgaagagctgccgattaccccggccgatgtggccgaggtcgagaagctcatcgcctccggcaagctcaacgacaagctcgccaagcagaccgtcgaaggcgtgcttaagggcgaaggcactccggatgaagtcgtcaagaagcacgactacaagatcgtcgaagacaacggtgccatcgagacggccgtcgacgcggcgttcgaggcgaacccggacgtggtcgagaagctcaagagcggcaacatgaagccgatgggcgtgatcatcggcgccgtgatgaaggccacgcgtggccaggccgacgccaaggccgtcaccaaggtcgtcatgagcaagatcaagggctgattagattcactggctcccctctttgaggggagcctttattccttttgtaagggaacgaccccactcacttccagcgttcacccagtcaagtaagatatgttcggcactgaattgcgagccgaaacaggggacatacgctaatgactgaaaccaacgagacgctgagcctggctactgacgcgcaacttacgcgcgatctgccacatagcatcgtcattccaccgattaccggtgaaatggtgcatttgcgccccgctaccgttgaagacctgctccggttggatgaactcgacgctttctatggcgcgtccaaaatcaccggtaaagatgcggccaccgaacgtgccgtcgtgcacacatgggttcgtcgttctcaggcttgggaagccggacaggctcccgcggaatcaggcgtgggcgatccggaatctcgccgcaccatcgcatgggccgtgcttaccgacgccgaccatgacgatgacggcatgatcgatgccgctcccaccgacaacgttatcggcatgattttcctcatcgatatcgatggctggtcccgttccgcccgtatccagatcattctgggcaaggactaccgcggccgcggctattcccgcgatgccatgccgcgtgtgatgacctacggctttgccccggagccggccggcttgggcatgcaccgtatctgggtgagcgttccggaaacgaacactcgctcgatttccgtctaccagtcgcttggtttcgtgccgtcgggcacatcgcgcgatgccctgtgggatgtggaaaacaataagtatcaggatcttattgttatggatacgttggtggatgaatacgatccgattcgctccttggatgctttcggcatgcacttgattgaggacaatcccggcgtcaaggaagcgctgtctgcgcgtgaacactccatggcgattcagcagcgtgttgccgagcccggagcaggagagcagtccacggctgccgacgagtccgagacatcgtctgaaatcgccgaagcacctgcccaaccgcagagcaccagtgagcaggccaccacgggaacgcatactcgttccacggatgaagagagcaattggccgtatggtcaggccggccgcaaatcttccaaggaagcttggtggcgtacactgggtcgcggacgcaagcgagatacggaaggtgaataatcgagcatgagcgccgaggatctggataattacgaaactgacgccgaactcgcgttgtaccgggaataccgcgatgtcatcaagctgttcacgtacgtcgtggagaccgagcgccgtttctatctagcgaacaaagtggatttcaatgttcgttccgcaggccaggacgtctacttcgacgtgcagctgactgatgcatgggtatgggatgtgtaccgttccagccgtttcgtcaagtcggtgcgtatcgtgacgttcaaggatgtcaatgtcgaggaagtacagaaaaccgacatcgacattcctgacgatattcattaaaggtgtatctgccctcgccaagataacaagaggcggcagcacaaagaacctgtttgcatcgcccgcgcgcatcgcggtctatgcaatattcgcaagggaatacacagtttgaacgtgcgtttccgaggcttacgataaactatcgctgatttggttataaggagatgcaagtgagcgaaaagcaatctgtggtgattatcggtggtggtcctgccggtttgaccgccgcatgggaattgattaaggacggcggcgctgataaatacgatgtgactgtgcttgagggaacccgtgcattcggcggtatctcgcgtaccgtgaagcacaacggcaaccgcatggatatcggcggtcaccgcttcttctcaaaggacgagcgcatcatggattggtggaagacagttctgccgctgcagggcgcgccttcctatgatgacaagaagctcggccgtgagcacgatatggagtcgggcggccccgatcccgaggtggaagacaaggtgatgctaaagcgtcaccgtgtgtcccgtattttctggaaccgtcacttcttcgactacccgatttccctgagccccaacacgctgaaggctatgggcttcaagctcaccatggtggccggcttcagctacttgaaatccatgttccacaagttgcccgaagacaatctggagaacttctacatcaaccgctttggccgcaagctgtactcgatgttcttcgagggctacacggagaagctgtggggacgtcacccctcccagatttccgctgactggggtgcccagcgcgtcaagggtctgagcatcatgggtgtgctcaagaacgccttccagaagctacttcccaagcagcgctccaacgccgaggtcgagacctcgcttatcgaggaattctggtacccgaagtatggccccggccagctgtgggagactgtggaatccaactgtgagaacgccggcgtcaaggtgctgaccgacgccacggtggtcgaactgcgtcagaacaacggctccatctcctcggtggtgtatgaggactccgaaggtaaccgcaccgagcttgccgccgatcagttcatctcgtcgatgccggtcaaggacttggtcaacgccatcgatgcagccggttccgatccggaaagccccgaatccaagggcgctcctgccgacatgaccaaggtggccaacggcctgccgtaccgcgacttcgtgaccgtgggtcttctggtcaagcacctgaagctcaagaacaccacgaacattcccaccctcggcaacccgccgattgtgccggactgctggatttatgttcaggatccgggctacaaggtcggccgtctccagatcttcaacaactggagcccgtacctggtcaaggacgtgaacgacaccgtgtgggttggtctggagtacttctgcgaagagggtgattccttctggaacatgagcgaggaagacgccaccaagttcgccattgccgagctcacccgcatgcgcgtgatcaatggcccggatgaggtcctcgactcccaccgtgaacgcgtgaagaaggcctaccctgcatacttcgatacctacgagcacatggacgagctcatcgaatacctcgatggcttcggcaacctgtactgcgtggggcgtaacggtcagcaccgttacaacaacatggaccactccatggccaccgccattgaggccgtcggcaacatcaagaccggcaagacgtccaagaagaatgtgtggtcggtcaacaccgacaagtcctaccacgaagaaaagtaatcggcggagcgtatgccgcctttctttaccctcgacgcacctcagtgcgccttcggggtcagacggcggcctccgcacgcgctgattatttttcttccctcgcagattttgcattctcggctcccctctctgaggggagctggctcgcgaagcgagattgaggggagccaaccccagcaattacacacggcctgccgatactcggcgggccgttttgcattggtcgtgctcgcgttgtagagtgaacaacgttcgcgagaacatcagagacgtagcgaacattcatgagcggtacagccgcaaaatcactcttaacgccgtaacaggcatgggcctgttcggtatggaaagggcaaccagtggcaaatagccagaatcttgaggatatgaagctgcctgagctcaaggagctcgccaagcaaatgggtctgcgaggcacatctaccatgcgcaagcccgaactgctcgccaccttgcaggccgcccgcagtggcggtgagccgccggctggcgtcactgtgcgcactcccaaggccgacaaggccgtcaccaaggcagccaaggctgagccggtcgtcgaagagaccgctgctctggcggaaccgcagcttgatctatccgcacttgccgaagagcccaaggccgcggaaccccgtcgtgtgcgccgtaaggcagctgatgaggccactgaagaaccgcgcgatgcccgtcatcgccgcgatgatgaacgaaccggccgcaagccgcgccagcaggccgatgaggccggcgatctgctcgcctccctcgatttgggcgagacaaccgcttccgagcgccgccgcaaccgtcgtgatgacaccgaagctccgctcattcgccgtgtgcatgatgaggatcagccgcgtcgccgtcgccgtcctgcggacagcagcgacgagaccgtgcgcgatttggatgacattctggccacgctgcccacgcagaagcacgacgaaccttccgacgatggtgaacagagcgaagaccgcgagttcagccgtcgcagccgtaaccgtgaccgagatcgcgacaaccgcaatgatcgcaatgaccgccgcaaccgccgtatgcgtggtcgtgaccgtggcgaaaacgccggcgaggacgatcgtcgtttcgatgatcgcgagaaccgcaatgaccgccgcgaggagccgcaggaagacctggtaccggtggccggcatcgtcgatgtgctcgattcctatgcgttcgtgcgtacgtccggctatctgcccggcccgaacgacgtgtacgtctccatgggtcaggtcaagaagtatggcctgcgcaagggcgatgccgtgcacggttccattcgagccccgcgcgagaacgatcgccgcaaccagcgtcagaagttcgtgccgctgcagtccattgactcgattaacggccagagcgtcgaggacgcactgaaccgtccgcagttctccaaactcaccccgctctacccgcaggagcgcctcaagcaggagaccgcgccgaacaagctcactggccgcatcatggatatcgtttccccgatcggcaagggccagcgtggtctgatcgtctccccgcctaaggccggtaaaaccatcaccctgcagaacatcgccaatgccattgccgccaacaaccccgaggttcacttgatggtggtgctcgtggacgagcgacctgaagaggtcaccgatatggagcgcacggttcagggtgaggtcatctcctccaccttcgatcgtcctgcttccgatcacaccactgttgctgagctggccatcgagcgcgccaagcgtcttgtggagctcggccaggatgtcgtagtgctgctcgattccatgacccgtctggcccgtgcctacaacatcgcggctccggcttccggtcgtatcctgtccggtggtgtggatgcccaggcgctctacccgccgaagaagttctttggtgcggcccgcaacatcgaaaacggcggctccctgaccatcatctcctcggcgctggtggaaaccggctccaagatggacgaggtgattttcgaggagttcaagggtaccggcaacatggagcttcgcctctcccgagagctggcggacaagcgcttgttcccggccatcgacatcaacgcctccggcacccgccgcgaagaactcatcaccgacccgcaggagctgccgattatctatcgtctgcgccgactgctgggtggcatggagcctgagcaggcctaccagaccctggtgccgcgtctcaagaagaccgcgtccaaccgcgatttcctagccgccatcgtgcagcaggccaacaccggcaacgcggtcaacggcaactgattaggctgctagaatctgacgtaaagggctgtctccattaatgcggagacagcccttttgcatagcgcatgcgtcatccatcacattgcagctgtaatattgccgcagcgcttcttcgcataacgaagttatatgacacggggaggaacatcgtgagctctatcgttctgggaatgggcaacgacgcagtcatgtttggtgatcgtgatgccagcaatgtgcccgatgatgatctcattcagctagtgaatcctgctgctgttaatatcagtgcctttgatttaagcgtactgcgcggcgatggtattttcgaggccaccaccgtgttcaagggcttcccgatttcgttggaaaaccacctgcgccgattgtcggattccgcctggctgatggatttgcctactcccaatattgcagccattacgcgcggtattgagaaggtgatgtctgcctatgatgatcctgaaccggcaccattactgcgtattatcgtttcgcgcggtctcgatcaggaaaccggaatcggcaaagctgctgcggcgtctggcaacactgcgccgactattttcatttgagccttctgttgttttcgtgggttagagggtgggtgttggtaggtgggtggttaggccgctgcatcggagtttgatcatggcgatgaggttgtcgacgtgtcggaagccgtaggccatgcggatggtggccttgatcttgttgttgaacgcttccagacgcgcgttggagtagccgggtccgatggttccgaggatgtcgtccctgcgtctgcggatcttcctgcacagttccacggcctcggggatgcggctgtgggaagcccggaagatccatcgtttcaattcggcttcggcttgtccggcgggttggtgcgggagcgtcctgaggagttccttcaactgccatgaccggtagagctggcccctggggtccgtgtccctgagcgtctccaacgctccggattgccgttcggtcaggtcgccggggttcttggggcacggcgtatttcaggcctttcatcgtctccgtggctgtcttgtcgttgccgcgccgggcctggttccacaaccgtttcctgacctggtcgagcgtgtcggtcatccaggagacgatgtggaacgagtcgagcacgcgctcggcgttcggcaggtgctccttcacgctggcgtcgatccatttggcgccgtcgccggtggccgccttgatggaggcgcgctgctcgtcggtcagttgtcggaagaacaggtcgaggacctccttgccgtacccgtcgtgcgcccagacgacccgtttgcgcttgtggtcgacgatcacggtgatgtacgtgcgccccttcctgtagctggtctcgtccacgcctatcgcggtgagaccgtcgaacatgcacggcggaggatcccaagcgggcggcgaccctgcgcgcgatgtcaccggcggtcctccactcgatgcgtaggaatccgcccacggtcttccggctggcgaccgccgtcagccacgcgcgctccatctcgaaatccctggtgaaccggctgcccggctccgcccacggcacttgggcgaccaccaccccatgctccgcgcacgccacgcgcccctcctgcgccgcacccggaccaccaggacgggagccgggcgcagcggcgagtcgtcgatggacacgtcctcgacgaccatgcccttgacgttcagcaatcgtttgaataagcccttcaaccaaggcgctttcctcggttgtatttcctggtcgaaaaacaaacctacaggaagcgcccctcacacattgggattcaacggctcaccgacgaaccaccacccacgaaaacaacacgagagcctcaaaataaggacagccgccggaaccgatggcgtcagtcaaatgtggggtcaccgcccaagccgtcatccaccattatcgccgatcagaaaccggcataaccattatcaacgtcaaatcgacacgccgacccaatcacatccattggaccggtgcataatcgtgaatagccgagtagccaccgccccacataagcaccggccaacggttttgcggcactgaactcgtacgtgatatacaagtccaccgcccgatcacactacaccctggaatccttcacgatgacactcgccctggcccaataagtccaagggaacatccaccccgaatacgtttgcacccattcgatttaggcatcagtgagtatcgttgaatcgtatgatggataattcgcagactgtgccgaagttgacgttgcagcgtcgcatcgagagcatggatctggtgttcatggccgctggacggcaggagtgcaagccgtcggattcgagcggcccgaggacatgctcctatcacatgctgcatttcgtgctcaaaggcaaggtgcatttctatcttggtgggcagcattacatcgtcaatgctgggcaatgtttctacgtgcccgagggaaccaatacgttctattattccgatcccaccaatccatgcatatacgcgtggatgaacttcaccggcgatgatacggtggagatagtccgggaatgcggcatgtccaatgtgtgccccgtgatcgccttgccggatgtgaagcctatctgggatttcattggcggactattgcattgctataatccgacgcccgccaacgatatagcgatccgcgggttcatgcatttgatctttgcgacgctgatgcgtaaccccaacgtttcgagcatcgcgcaggaagccagggattcatcgtccgagaatgatttgatcaagcgtgcagtcgcctatgtgcaggaacacgcggacgagactctgagcgtacagatgatcgcggacgcattgtgcattagccgcgggtacctgcaccagttgtttattaagtatctgcatacgactccgcaacagttcgtcatcaattcgaaggttcagaaggcgtcggaattgttgatcaaaaccagaatgccgatcgcgcggatcgccgagctgtgcggatatcgcaatcagttctcgttctcaagggcgttcgcgcgcgaactgacgctcagcccgagcgaataccgtcggcgcttcagcaatccggaccgtctcgtcacggaataaccattccgacgctgtattgcagtttgtaagattttgagaatcctttggatatctttttgtatgtccagaaatgttcggttcctcaatttgtcggctatatattgcagtttgttcactagataggccttgagcagcatcatcggatgtcatcttgcatataatcttagtacgtcattcgagaagtgatcagaaggacgtaatcagaaggaacggaagcccgcaaattcaaggttgaaatgcggattaatgtaaggattcaacatgcgcaaaaccatcggtaaggcaatggccgcaacgacatctttggcattggcattgtctatggcggcctgcgggtcgtcgagcgagaacgcggaggaagcgacaaaggtcggtggcaccatcaccatctggacgtgggagcagccgggcaaagcgttcgaagccgccgcgaagggattccaggaagccaatcccggtacgacggtgaaggtcgagaacgtcggtaaccccgccatctgggacaagatcaccacagggctcgctgctggcggccagggtctgcccgacatcatgaacgtgggcatcgactacatcggcggctacatggacaagttccccgacgcgtttgccgacctgtccgattatggcgcggatgacctcaaggacgatttcccgtccggtgtgatgaagagtgccacgcgtgacggaaagatctacgggctcccctttgaagtgaacaccggagcgctggtctacgacgtgaagatgttcgaagaggccggcatcaccgaggacgacatctccacatgggacggtttcatcgaatccgggaagaagctcaaggagaagaccggcaactacatgttcggcatcaacaaggcatgcaccggcaacgcgaactgcggtgacacttggcagattatcactgcattgcagaactccttctacttcgacaccgacggcaacatcaccatgaacggcgaggccggcgtcaaggccatggaactgatcaaggaggcgaacgacgcgggcatcgtcatcgagctgcccggaacatcggacgactcctcgtggcaggtgcagcaaggcaacgtcgccacactggtcgaccgctcctacctgcccggcgtgctcaagaccaagttccccgacgctaagaaccgttggaaggtgaccgctctgcccgcagtcgaggagggaggcctgcgctccgtggtgcccggcgcgacctacctgtccgtcgccaacgcgagcaagaacaagaagaccgcctgggagttcatcaagtacgcgctcggcactacggaaggccaaaaggccatgtatgaatcccagggcctgttccccggctatcttccgttcatcaaggaggatctgaacacccccgacgagttcttcaacaatgagaacgtcaacgaggtgttcatcaagcagctcgaggacgagacccccgagctcaacttcaccggagactacgcgaaggcgctgaaagccatgattgatgcccaagtccaggtgctcaccaagggcgccgacccgcagaaggccttgaacgaggctgcggaacgtctcgccaacgagacaggccgcaagatcgcctgaccttatcggaattcgcatggggtcgttggaacctctccaccccgacggccccatgtctttaacaattaacggtactccgacgaagggaaaggagcgacaatggtgacgcgagccaacacatcatcaaggaaacacttcctgacacaaagaaacgcgccgtacatcttcttgctgccaatggtgctgctatacggcgtgttcaagatttgtccatatctatattccgcctggctgagcttcacgaccaaccagtccggcaaacaattgttcgctggattcgacaactacacgcgcctgttcaaggaccaattgttctggaaggcgctgggcaacaccgcgatcatcctggtgatccaggtgccgctgatgctgtttctggcgatcctattggccgtcgcgttcaactccgcattcctcaaactgcgttccgttttccgcatgggttacttcctgcccatcgtcatgggtttggtcgcatacggaatcctgttcaagaacatgctcgacgccaacagcggagtggtcaactatctgcttgagctgatccatttgaagcccgtcccgtggctcacggattcgacatgggcgaagatttccatcatcatggccatgacctggcattacactggtcagaacgccatcatctacctggcccaattgcaatccattcccactgaactctacgaggccgcgtcggtcgatggcgcgaatggatggtggaagttccgctccgtgaccttgcctggcttgaggccagcaatcctgttgaccaccgtgctcagcaccatcggcacattgcaattgttcgacgaaccctacgtgctcaccaacggtggtcccgacaacgcgacattgactgtcggcatgtacctgtacatgcagggtttcaagtatttcgatttcggatacgcgtcggcaatcggctatgtgatgctcatcatcatcgttggtctgagcgtcatccaattctggatccaaagggagaagtgacatggccacgccaaatctcaaagtagacaagtcccagagggtcgatgcgaagcggaacggctggcgcaccgtcggactgaccgccatcctcgggatcggactcatcgtcttcgtgttcccgttctactggctgctcgtggcgagcaccagaaaatccacggacgtgttctcgaagacaccccacatgatccctggcaccgaactgttcaacaacatccgcaacctgatgaccaacacccagttcggcgacgccatcgtcaactcgctcatcgtgtcggtcacctacgtgatcgtcggcggcgtgatctgttccctggccgggtacgcgttcgcccaataccgcttccgcggccgtaacatcctgttcgcactggtcatcggtgtcatggcattgccatcgcaggtcacgctggtcccgttgttcaagatgatgttgtcgttcggctggctgggaacttaccaggcgctgatcttgcccgatctggcgttgccgtttggggtgttcctcatgagacaggccatgtccacgttccccacgtcgatcgtcgaggctgcgcgcatcgacggcgctggtgagatgaggatcttcggcacaatcgtcctgccgaccatgaagcccacgctcgccgcattggcgatcttcatgttcctcggacgttggaatgacttcgtgtacccgttggtgatcaccaggacgccggaacagtacacgcttcccgtcgcccttgccacattgcagggtgcgaacaccacggattacggccagttgctcgccggcacgacgatctcgatcctaccggtcctgatcctcttcctgttcctccaaaaggaattcgtgtctggcatgacggcgggatctgtcaaggagtgacattctcaggtgccaaagaaggcactggaaaggacggctcatatgcttttggatcatttcaaggacatgctgcatgaggggcaaagcctcggcgcgacgtggatcatgcattcggacgggctgaccatcgagacgacgtgtgaagatggtccggcatcgaagggcatcgtgttcgatgtgacggcggcgaatccgggggccactgcgacgattgtgatcggcaagcctctcggctccatccagaggtttcacatggtcggatcccgttgccgcgagccgttgcctgctgactgggccggcgtcacgcaggtgtcgttggtcaattcggcccccatgggatgcatggtcgacgatgcggacaggaacgtgctgtcattcgcatattcgttcgcacaggacgagattacgatgcgttacggcgtcgacgaggaacacgtgttgttcgtcgtgatgctgcagatccaacgtgttcccggacatagccgactgctactcatggatgacggactgccgttggatgagacgatgcggctcttggtcgaatgggtggccgatggttccgcacctttacccatggcggacaaggcgctggaaccggttttttccacctggtatgcgtacctgcagaacgtcgacgccgagaccttgggacgtgagctcgacggcatgagccgactgggatgtggatccatattcatcgacgacggctggcagcaatatggcagcgggcgcggatattccggttgcggcgactgggttcccgatcccgttaaattccccgacatgagtgccactgtcaggaggttccaggacgcgggggtcggcgtcgtcctgtggatcgcacccctgttgctgggcgagaaggcgcacgtgttcaagacgttggaacgatacgcgcccatccatgacgacgggctgggacggcaattccacgtcctcgacccacgacgcaaggcggtccgcgactacatcggcggcgtttgcgctcggatggccaaggattacggcatcgccggactgaagatcgatttcctggaacaggccggggcctaccaaggccagccattggagaatcccgaacccggcgacgtcaccgatgtcggcgaggcgatgagacttatgctcgaacggatcaagaccatgttgatcgaaaactgcggtcaggtcccggtcgttgaattccgccaaccctattccagtcccgtcatcgcaccgtacagcaacatagtcagggccagcgactgtcccgccgatgccctgaccaatcgaatccgcaccatcgacgaacggctggccgctggtaaccgcgtggtgcacggagatatgctgctgtgggacgtgaacgcgggagcggagacatgcgcggcgcagatcctcgcatcgttcttcgccgtgcctcagatctcggtcccgccgtcggccatgtcgaatggtcagtatgaatcctgccgtttcctactgtccctatggcgcaaacaccgaaacgtcctgttgaatggccgtctgcaaccagtgtcaagcattctgggctatccactcgtgcacgcgttcgacggcaacgggacgcaagtcagcggcgtgtacgcgccggacatgatcatcgacgtggacgcggatacgagaacgctgatcatcctcaacgcatccacggaaaacaacgtgaccattcgcctgcgcggtgacggcgggacggtcaagttgaccggccacgcatacgactgcacaggagccatcactatgcagtttgaagaagatacagatacgttccgtgaaaacggagacgcgacgatcacgacgattccagttcccacctatggcatattggaattggcgctagagcgataaaacgcgatacttttctgaaccacggttgttggactggagaaattcagattcgatgatcggaggtgtggttctttcgtatgggtgaagatcggaggagacattacgacgacgggttccggcgcgaggcgctggaacccgtcagggccggggcgggcagcaggacgttggcgcgccggcttgcgatgccacggcagaccccgaaacaatggatcctgttgtatggatccaacggcgaggaggcagtcatgggagccaccggcaacaggcgctatgactggtagacgaaggtcgcggccgcgcgcgaccacgtcgaggacggcctgaccgtagccgatgtcatggccaaatacgggattgcgagcatcgcgccgctcaaccgctggtgccgcgactaccggacgggcggcgaggaggcgttgagaccgaagcccaagggcaggcccaaaggcgtgaaatccaagcccaaaccaaaaccaacgcgcgagcatgagctcgccgaggagaacgcctatctgagggcgaaggtcgcgtacctgaaaaaactccggtccctgcgggcgaacaagtcatgcggcgcgagcgaagcgccgtcgtccgactgctctcagggcaaggacaccggctcgaccccctgctgaggatagcggggctggccagatccacgtacttttaccatctgtcgcatccggggcatgcgacgcgccctgatttcgagcccatggtccgggagatctgggcgcggaccgccaacaggggcggccaccggcagatccacatgtgcctggcgaatgagttcggacagaaggtatcggccaaaagcgtattgaaggtcatgcgccgcatgggtctcagatgcgggatccgcaaagcgaacccgtggaggaagtaaagctcgtacaggggcgatcaaggcgggcaagtgccgaacctgctcgaacgcgacttccgggtggaccggccgttcgccaagctcggcagcgacgacggttacacgcttgagtgctcgaattcctccatcgtggcgcgctacggagataccctggttacccctgatccgcgtattggtattctgcatggcacctcgcaacgtgagatgtttgcatgggcgcttcaggaaggccagcatgcgcagtacaagaagctgccatttgctgaactgcgcgaagccgaccgcctctatatggtgcatggcggttgggtgattccggtcaacgagctcgatggcaaagcatacgccgttgatatggcagaaattgcagcaatcaattatgcaatccatactggccgtacccatgatgatgcgctcggcattgggccagtcggaaattacgacgtctgagtatcgcgcaaggacttgaacgggagtattctcgatatcatgagcgaaacgagcagtgactggcaaaagaccaccattgattccgcccaagcggcggctcacccggaaaccgcgcaggcggtggcgcgtatcaaggcgctacgtcagaccatcgataatatcgattcggcggccatagccctgttgtccgagcgtttcaaagccacctcgcaggtgggtgtgctcaaagccaatgctggattcgcccctgaagacaccaagcgtgaggattatcagatcgagcgtctccaccgcatcgccatcaatgccgggctcgaccccgaaatcgccgaaatgtaccgtgaattcgtggtcaccgaggccaagaagcggcacaagcgtattgccgacgccggaggagacccgggcgtgctcgacgtattcgcctgagcttctcgtagcaatccattactggtcagcggcacacgaattgcccatgtccttccaagggcaatggcgactacattgatacgggactatcgataccgatagccaaaaccgtataaccattgaccacattgaacggaaacgccgccatgagacttgcctccgccttgatcagttgcgtactatgcgtaaccggcactgttggcggtgcgtggctttcccgtccggcatcagtcgattatggctctctgctttccaaagcaagcgacatctatgccgttaccgatgagaggggagacgcaacccggctgtatgcggtgaacaatgccagcaatgcggcaatctcccgcattccgggcgcggctgctgaattgccgtggaaagtcaacgtcacgtattcgctggatggtccgaacgttgaggccagcgagatttccggagcgtctggacttgtcggcatatacatcgatgtcaaaccgcagtccagtgcagccaaccatacgattccggttgtcgccttcaccgtgcccactcaagtgactggtgatatttccgccgataatacggcttcggtagccacgcagggctccgatattgtggtagccgcggcagggaacgtttcttccgggctgaaattcagctgctacatggacgcgaagaagttctcaatgggtgccgtgacgctcgccgcgctgccgtcttccgaagagccgtcagttggagccgatcctcaggccgcaggatccgccactcagtctgaggccgatgccggcgaccaaaccgctgccgatacagatgcttcccagctgattgccaacagcgctactttggtcgattccctgacggatgcgggctcaggcgagcaccagcagcttatcgatcagctggatgcgctgcgcagcaacgaacgtgcgctcgacaagtccgtggtggccgagcgtaaagtaacccacaagcaggcttttgatgcgtatatggctgcatatgttggcgcctataccgatcacttgtctgggtccattggtgattccagccagctatccgcgcttatgggaacagccggggagctttccaaaaatacgccattagcccaagcggtgattgatctggccgatgcagtgaacaatgtgagcgccgcgcaccagcatgcgggtgcagtcgaagcattggacgaagtgattcggcgcatccaacagcagggaaccactggtttggcggacgatttgaacaccgaagccgctgaagaggccaccaagggatccaagcagtatgccgaggggcagagccaattgtctgctgcgatgatcccgtattcgatgaaatacacggacgtatacacggccaatctcagcgcgttgaccggcggcacctcgtctggtgccgggattcacgagcagcaggcaatcgctgaaaccaatagcagcgacgatttgactgaggcacagtccaaggtcgatgctgccatgagcacactcgccacggcatccgagcacaccggtaaggctgcggcattgcgtcagattgtgcttcgtttttcagaccagttcgccagttccggcaatgtgcagaatgcgtcgagcggttctggctcggttgatcaggcccatgcactggccggcttggcggacgcgcaatcgcagtcgttctatggcaagactcgcgccgtggaagccaagcgcaaggccagcgctgcacgcaaacaggccaaggccgcacagcaacagcaatcgcagcatgctgatgcctcgctggtggatgacacgatgtcgctgtcttcagcggacgtcatgcactatgccaatggtgtcaactcgtcaatcggctcttcgcagaccgccgacacctttgccggaggcaagctgaactctgcagacgggtcaaccgagcaaagccgcggcaagcccaaaaacgccgcttctcaggccggtgattccatggatgttgccccaacgttgtttggctttggcagtggcggtacattgctcaagcatgatatgagcacactgatcaacgagactgtagagataagcgatgccggtgagctcctgaaccaggcggtcgcccagatcaatacttctgccgtgcaacaaaaaaccgccggaacccgatatctcatcgtggttccgacggtttaatctggctcaaagaggggagccagagcggcgacttacttcttcggcttcttgaccgggggttcgccgagctcgctggtctcgacggccacttcggtttccggtgcatcctcggcagcggattccgccgtgtgcttggccaccaggtcgaacttgccgaccacacggccggcctgtgcgatgtcgcccaaagcggcgtgaatcgcgtccacgccctcggcagcggcggagagcgccacagacagaatcggggtcttcatggagaccttggcctcggacttgatcttgcgcagctgctccacagccttgccggcccaggtcagcagctcgggggaggcaccggtggcggcctcgacgtacggattcacaaccggccaagcggcgcggtgcacggaaccggaaccggcgtgcatccagctccacacctcttcagaggcgtacggcaggtacggagccagcagacgagcaaaggcatccaagcccaagcccagcgcggtgcgggcggacttcacggccttctcggacggcacattgccctgctcgtccggagtgccataggcacggttcttgaccagctcgatgtagtcgtcgcagaactgccagaagtaggactcgatgacctcaagcgccttggagtgctcgtaagcctccagtgcttcggtggcctgacgtaccaccaaggccagcttggccatggcggcgcgatccagcggctcggtcacatcggccgggttccacgaagcctcagcggcttcacccacgtggtggttctcgtcctcgcggccaatcgccagtgcaaacttggtggcgttcagcagcttgatggccagtcgacggccgatcttcatctggccgatgtcatacgtggcatcgaggcctaggcgcgcggcggcagcccagtagcgcacggcgtccgcgccgaacttctcgatcggctcgttcggcaccacgacgttgcccttggacttcgacatcttcttatggtcgggatccagaatccagccggacagcgtggcgtgagcccacggcaggcacttgttttccaagtgcgcgcggtccacggtgctgaacagccaggtacggatgatgtcctgaccctgcgggcgcagatccatcgggaaggtggacttgaacagggcctgagaagcctcatccggctcagcccagtgggtcacgatctgcggggtcaccgaagaggtggcccaggtatccatgatgtccttttcggcggtgaagccgccgggcacatcacgctgagactcgtcgtagccttccggcacatcgatggtcgggtcgatcggcagacgatcctcgctcggggtgatcgggcgatcgtaatccggctcgccggaagcgttcaccgggtaccacagcgggaacggtacgccgaagaagcgctggcgggaaatcagccagtcgccgttcaggccgtgcacccagttctcgtagcgcacgcgcatgaagtcggggtggaagttcagttccttgccgcgctcgatgagttcggcgttcagcttctcgtcggtgccgccgttcttcaggtaccactggcgggaggtgacgatctcgagcggcttgtcgcccttctcgtagaagttcgtcatacgcttggtcggcgtcggctcaccgtccaggtcgccggactcacgcagtttgtctacgatgaccttacgggcggagaacgtggtcttgccagcggtctcggcaaagacctcacggccggccgggtcggtgatccaatccggggtgtccatcacgatacggccgttgcgctgaatgatcgggcgggtgggcagcttcagatcgcgccaccactcaacgtcggtcacatcaccgaacgtacagcacatggcgatgccggcacccttgtccatttcggcggccgggtgagccagaatcggcaccttgaccttgaacagcggggagtagacttcctggccgaagtactgcttgtaacgttcgtcattcgggttggcgatcagcgaggtgcaagcggccagcagctcggggcgggtggtctcgatgtagattggggtgccgtcctcaaagcggaaagccactttgtggtagaagcccgggtattcgcgggactcaagctcggcctgagccactgcggtctggaaggtcacgtcccacaggccgggggcgtcctgctggtaggcctcgccgcgggcaaggttgcgcaggaaggccttctgagccacgcgccgcgggtgctggccgatggtgtggtaggtctgcgaccagtcgatggacaggcccagcttgcgccacagggcctcgaacagcttctcatcctcggcggtgagcttctcgcacagttcgatgaagttcttgcgggaaatcggcacctgatccttggcgtcgatcttcttgccatcggtgccctcgaacggcggcttgaagtccgggtcgtaggggagggacacgtccacgcgcacgccgtagtagttctgcacgcggcgctcggtgggcaggccgttgtcgtcccagcccatcgggtagaacacgtcatagccgcgcatgcgcttgtagcgcgcaatcacgtcggtgtgcgtgtaggagaacacgtgacccacgtgcagcgaaccggaaacggtgggcggcggggtgtcgatggagtagacggccttacggtcgcgggtgttgcggaatttgtaggtgccgtcttcgtcccagacggcgcgccacttgtcctcaagcccgtccacgccgaccttgtcgggcagcggggtgagttgcgcgttgatgatggaattgccttcagtcataaggccaaagtttatgcatgttgcatgacaaggcgttgttgggtttgctctatcctgcttcgttcgtctgctcccctcagtccgcgaagcggactgaggggagctttcaggtgggagtgcttacttcaccgtgaggtcagccaacggcatgcgttggtcgatgagcgcggccggatatccggaaagcttggtggaggccacggtaaagcatttgcgcgtgtacagccagttgcttgacgcatcttcgctgagcttgcgcgcgtaggtcttcattcgttcggcatagtcggcgtcgttggtggcggcacgggcatcggcataggcctgctgcacctcggcatggttgtagtggaagatggaatccgggtcggcaaacgtgccggcgtcatcggtgccattcatgctcatcagggtcagttcccaagtgccgtcctgaatacgcttggcatattcttcgtcagatacgacttccagattcaccgaagggcgcggcagctgttcgatttgctgcttgatggtctcggccatcggctgccactgcgcggtgaccaccagatccaccgtggtcagataggtgccgaaataggaggtcatcgtttgcgtcttggacatatcgtgcgggaacaggccggtcaaatcctcatatccaggttccaacgggctgatcgggcctcccagcgcaccgctggaatccggctgcgaggcggcgatgccggccgaatcgatgaggtatcggaacgtggtgcgcacgttctgatcggacataatcgaatcggaattgttgttgaacgccagcagcaccttgtctgtggtggcgccttcggtgacggtcagaccgtccttgccgttcatctgcgatgccacggtggcggtggcgggtgcggccatatcgatagtgcccttggatacggcatcggccagcgacgtctcatcagaatattgggtgaatgtcacggtaccgacgtgcgccttggtgccgtggtagctcccgttgtaatcgagcgtcaacgactgcccgggcgtgaacttgccaacggtgaacgggccggaacctactgcctgcttggcatagtcggcatcgcccgcttcggaatcgtacacaatgcccagtctgccggacaaggcacgtagcaacgtggggttggtctgcgcaagagtgatgaccacggtggagtcattcggattggtgaccgacttcagatcgcccagatcatccacgccggcatatttctgggttatcgcctgttgcagggaccacaccacatccccggcatccaacgtgtgcccattggagaaggtgagtccggaggcgatggtcagggtataggtcagcccgtcatcggatgttttccaatccgtggccacgcccggcttgagctggttgttctgatcgacggtcagcagtgtttcgtacacgttgtctagcagcagacgttccgccgaggccgatgccgtggcacggatatccagcgattgcggcatatcggtaataccgacggacaccttggtatccgggccggaatccagtagacccggaatggaatgactgcgcgtgattaccgaccagccaaaccacaccagtgcgctaagcactgcggcgattactaggaagaccacccatctgaaccgctcgttgcgactcttatgcatgcccatcagtctaacgagggtgcgctaccgaacgtcactttgtactgatcccagcgctggggcaggtggcggccagcgggcagttggcgcagtccggcatgcgggcatgacaggtggatcggccgaacaggataagccgatggctgagatccgtccactcttcaggtgggaagcatgcggtaatctcccgctcgattttcacgggatccagatgagtggagcgccaatccgatcgccagcgcagacgaccggtcacgcgcatcacatgagtgtccacgggaaagccgggaatgccgaaagcgttgcccagcaccacattggcggttttgcggccaacgcctggcaggctggtcagctcatccatcgattgtgggacctggccgtcaaagcgttcgtccaatgccgtggccaagccgatgagatgctgggttttcgatcggtagaagccgagcggatggataatatcctcgatctgagccgggctggcctctgccaaatcatgagccgtgggatacgtggcgaacagttcgggggtgaccgtattgacacgcttgtcggtggtctgggcgctgagcacagtggcgataagcagttgaagcggggaggtgaaatgcagggcgcactgcggttgcggaatcatacggcataggatgtcgtattccttgtgcatgcgctctatgcgcgcggttttggtttctcgcatgagaggtgaaacctgtgagccgtgttacgcggcggtctcttccgtatcggcagcgtcgtcaatggaggatgccttggccgcttgttgtgcggcggcatcgcccttgtcgttttccggcggatcgaagcgatatcctacattgcggactgtgccgatgagatgctcgtattcgccgccgagcttggcgcgcaaacgacggatatgcacgtcaacggtgcgggtgccgccgtaatagtcgtagccccacacttcctggagcagctgggcgcgggtgaacacgcggccggggtgctgtaccagatacttgagcagttcgaattccttgtatgccaggtcgataggacggccatgcagggaagcggtatatccgttggtatccacaatgagatcgccggagcggatctgcccgtcttccacagtggtggacgattcggacacggaaccggtggaagcaatagcgggggcgttgcctctctcggaaaccagacgaagacggccctcgacttcagccggggaggcggtggtcaccacaacatcggcaatgccccattgggagttgactacggtgaagccaccttcggtaagcaccaacacaatcggcgtggaaagacctgaagcgtgaatcaaccggcacagtgttttagccgtggccaagtcatctcgagcatcaagaaacagaatggtgttttccggcattttcaccagactggccgcatccatgggcagcacgcgaacacgatgggagagtaatgcaagtgacggcagtacggttgcgggatcgctggcgaaggtcatcaacgttaagtccgtcacgctaatcccccttggtgatactgcacactcttgttcgactcggcgcgaatcaagggcaacgcctctttctttcgcgcggttttccctattctacgcgcctgtattggacactgatatgtaacaatcgcgcaatatgaacgggggaatgccagggtcagctgacaagcggcatgataaccaaggtggtggcggcgatggtcacgcccatcagcatcaccggcagcagaccaatgccgatccacggatggctggcattcggatcgggatcggagtcgcgcacccacagtatggaggccactaccagtgccgcggccaagacgacgagcacgatgacggcaatggcgcccaccgtggtattgcgagagatcatggtgccaagatcaggcaggaagcaccagccggccacggcaatggaagccactcctgaagtgacggcatgagacagggaacgaatcagatgagagcgattctcccttgccatttggcggccaaaggagaacaccaccagcactacgagcagcaggccgacaacaagagcccacgagtaccagcccggtatcttgccatcaacggcgatgtgctgaggtgcgattcctccggaggggaaaggcacaacgacaaaaaccagcgatatgacgccgaataccacggtcgtgacacgatctagcatcgtgccgcggaacggccatgaggcgatgaacgccgccagcaccagcgcaacgacaatcatgggaatgatgggcgtggtgccgggggtcggaataaccgtggccgcaatcagcaacacgtatgctgtgacttgcgccagcagcatgcttggtaccttgtgcttccagctgtcctgggtggtctcggtcatgtcaagcctctcgatggaaatgtctgtaatcctaatcctacgtcgtgcagagggacagattagaacgcgataatgcccaggtgctccagcagtactttgacgccgatgagaatcagcaccacgccaccggcaatctgcgcgggcttctgccaacgggagccgaaaatacgcccgatgtacaggccggctgcggagaacaatccggtgaccacgcccatggaagtaatggcaaagatgatgttgattttcatgaaagcaaggctgacgcccacggcgaaagcgtcgatgctgcacgccacggccaaaggcagcatatgcttccagtcgaattgcgcggtctccttggcgttctcttcgtcttcattgaaggcctcgcgaaccatattgccgccgatgaatgccagcaggccgaagatgatccagtggtcgaaagcggtgacatacgtgctgaatgtggaggccgtgaaatagcccaaaagcgggaaaagcgcctggaatccaccgaaccacagcgctgttttagtggcatcctgcaggcgaatacgggagacggtcaggcctttgccgatggaaacggcgaatgcatccatggcgacagagacggaaataagcaaggtttgaatgattatcgaaatcatggtgtgacagaaggttcatcgccggctcctgccgtgcgatgggcctcgaccagcgttcccacacgccgcctacgcctagttgaaaaaacagtctataagtatagcacagaaacgaagaaaagcccttcctgaagggctgtcggcctggtggtgcaggtggctatcaagcagagcgcaaacaacaaaaggcccccgaaggagccttttgtaagttattcagcgattcagagccgaatcacttctcggaatcggcgagacgctgacgagccgcaacgatttccttctcggcggcttcaacgccggtccagtagtcgcccggcagaacttccttgcccggttccagagccttgtactgctcgaagaagtgcttgatttcagccttgtggtactcgttgacgtcttcgatgtccttgatgtcgtcgaaacgcacgtcggcaggcacgcacagcaccttgtcgtcgccaccggcctcgtcaaccatgtggtacagacccacggcgcggcactcaaccacgcagccggggaacacggagttcggaatcatcacgagagcgtccagcggatcgccgtcctcgcccagggtgccatcgatgtagccgtagtcatccgggtagcccattgcggtgaacagggtgcgatccaggaacacgcggccggtctcgtggtcgacttcgtacttgttcttggagccgcgcggaatttccacaacgacgttgaaggtttctgccattggttatctccttgtttggaaactattcgttacacacactactactgggcgggcatcccggctatagctgtgcccgcctttcgtttcactgcacggacaggatatgggccacgtccgcccatggggcgagcgagacgtagttgtcccagccccactggaattcacgaccggtgagttcgtcacgtacgttcagcggacgatcggtgggtaagcccagctcatcaagatccagatgaatcattgcctgatgggcgttgtgtccatcaaggttgaccaccacgatcagcgtgtccgcgtggccggtgccggtcagctctgccggtgtatggcgggcgaatgccagcacgcccggatcggaggactgcagcacggtgaggttatggtagctgcgtgctgccgggtgggcacggcgaatcttgttcaacgaggtgagcatctcggccacgccgaactgcttggccttggaccaatcgcggactttgacctcgtacttctcgttgtcgatctgctcctcaaagccggggcgctgcttgttctcgataagttcgtagccgttgtagatgccccagcttgggctgcccaaggctgccagcaccgcacgcacgcagtggccggcgatgccgttgtcacgcacgtatgcggtgaggatgtccggcgtggtgggccagaaggtgttgtgctggtagtagccgtcatcgccattggtggtgggcagatactcctccagctcttccttggtgttgcgccacgggaagtagcagtgggactgggtgaatcccacgtagctcaatgcgcgcatcatgcccgggcgggtgaacgcctcggccagaaacaggatttccgggtgctttttggtcactgcggcaatcacgtcctgccagaaacgaaccggcttggtgtgggggttgtcgatgcggaagatggtaacgcccgcctcgatccacaggttcataatgcgctcgacttccttctcaatgccggccatgtcggcgttgaagtcgatcggataaatgtcctgatacttcttcggcgggttctcggcgaaggcgatggtgtcgtccggcttgtgcttgaaccatgccggatgcgccttgacccacgggtgatcgggggagcactgcagggcaaagtcaagtgcgatttcgaggcccaactcgtgcgcgcgctggcacagtgccttgaaatcgtccatggtgccaagcagcgggtccaccgtgtcgtgaccgcccagttcggagccgatgccgaacggggagcccggatcgtcggggccggcgatcagtgagttgttgcggcccttacggttggtcacgccgatggggaagatcggcggcaggtagacgatgtcaaagccttcggcggcggcacgttccaggccggccatcgaagtctttaacgtgccttgcacgatcttgccggtggcgggattgatggtggcgccttcggagcgtgggaagaactggtaccaggcggcgaagctggactttgggcgttctaccttgaagcgctggggctggctgggggagatgccgtcgcgcagcgggtgggtgtcgtgcagcgtggcgatgcgcggattgtctccggcagccaggcgatcttcggcgctgagcgaagcgtcggccatggtttcggcggccttctccaaagtcttgcggtcgcgtgcggtgagattggcatccggggttgctgcccagcgagccaacagttcagcgccggaatcgagcgcattgttcacgtcatccttaacgcgaaccttgatgcgggcatcatgcagccaggaaatataggtgtcttcccatccttcgatggtcacggtccattcgcccagctgacgtttgacggccgcatagccatcctcccacggcttcaggtcgctgtggtcgccgcacttgacggtcaccacccaacgatcgagaccggggttcacgcatgtcatggggcgtcgcagggtttccttgccgcgcggattgcgcactatggcggtggcgcctaccttggtgcggccttcgatgaacacctgggcggtcatctcgaacggttcgccgagctccacgcgggcggggaagatgccgcgttcctcggcgggggtgatgtccatgacgttgatacggccaaactggcccggctcgctcgcttcgatggtgggagccggcgcctcgctggcgaggccctgcagggctgccggcggagtcgctgttgcggtgcgggcccgcttgcgcttggtagtcgaggatgaggtcgtctttgacttcgcggtcttggtggagtcgctgttgcttgtgcgcgtggtcgcgcgatgttgtactgctgccatactgcccattctaaagggcttgagctcggggacgcgcattgtggacacttctggcgaaacgttctgcaaacggcatgaagtggataacttgatagcccagttatccacaactcgccgaaaaaacgcaagctcgaaccacattggcctgaaaccatgtgccgcacgccgccaacctgccatgctcgtggtctatccgcacgcacaaggatgtgcggttcaagcaagagattgaagaaaggactcgcgatggcattggcatggcggagaaagggcatgtccatactggccatgctgacgggattgatattggcgctggcaatggtgctgggtatggccggcgaagcctatgcggcgtcgctgagaccctccgagcagaatctgcatatccggtttacacacggcatttcactgcctttgggagtaatagggctggatacctcgaataaccattactactgcatggaagcagggcccatcaccgactacacggtcggcccggtgcgattgctgaaagacgaccagaatgcacgccgcatggcctggattcttgagcagtaccgaaaagctggcgcgcgggatcatgcggccgtggcggtgattatccaggatcatttcggcatcggcactcagtgggcgcagcagcgggagagcgtccggcagcagcacccggatatcattccgcgtgcggaacagatatggcaggaatcggaaaacaaagtggccgcggacgttgttgtggaacgcatcgatgccgtggcgctgcgcagcggatccgtggcggtgagcgtgaagggatacaacggtgagcttgtggaaggtgttccattcacggtaacgcttgaggggccggcgcattttgtgagtaccggaaaagctacgttctcaggtgtatccaccgctaccgtgcagcaccttgcatgggaggcagatggtcacggcgaagtaacggcaaaaaccacctacgagtacgggcgcttgcgcactatggacggcattcagcagctcctgggccttgattcgttcgtctcgacgggcggttcggcgacgacattcacggtgcgcaaggactttgctcctatggtgagtaccacggtctcggacaaagtggtcgatgccggttccccaatattcgatgatgtgaccagtggcgtggccgactccagcagtcactgggtgccagacctcgccttgcaagccgaagggtactactttgatggtctgactgccgatgatttgggcttggtcatcgaaccgcgctcgcaggaaagcgccgatggttttctggcgaggatcaagcaagccgggtatcgtccatcggcatacggccagacttcgttcaccggtccgggacaaactgtgcgcgtgcaagccatgaccgagcctggtggcagtacgccatatctggcaggtgaggcggatcaggccgatggcggtggagccggtacgggcagtttcggcacgtgggtgtgggtgttccgtcgtgcttcgcaaagcgatgaagccaagcagtatcttgttcgggactggtccagcacgttccttgaagctgcggaaagcaatgtgaatcgtcgcaaggtcgcggtcgagtcaacggtgaccgagcattccgctcatgtgggttctgaattgagcgacaccataaccgtgtccggcttcccgagcgaccatgggtcgttcgccggcaatgaggagtatggattcggcgctgaccgcccgcatgccaccgtgagtgtgtggtggtccggcgatgcggatgatgccgtcaatgacgaggcatataaaccgactggcgccgaagtgccggctgaggatgagcatcaccgcttggtgggatcttgggagattccggcgcgcgacggaacgttcaagttcggtgcgggatcgttggacgcgcatggcgagccggtgcacatcgttgccgatcagcatggctggtatgtgttcgtctgggaatttgcgggcgatgaccgtgtgatgccggcagcgagtagatacgacgatgcatgggagcggacgcgtgtgtttgagccgggggagccggaagaaccggaagagccggaagagtcggtggaatccgaggagcagctgcctcatactggaatcagcatggtcatgccaagcgcagtggcggttgcgttcctttccgttggctgtacgatgcttgccatagtcaagcgccgcaggcggtgagacggcataacgcagaaggtcggaacccaataggattccgaccttctgaatgtggtagcggggcatggatttgaaccatggacctctgggttatgagcccagcgagctaccgagctgctccaccccgcgtcggcttgtcttttagacagctctatctacaataggggcaattttcaggaagtcaactcggcgtgttgtgctgaatcatggctatgagcatgttctcctcggccgatcggttccggcaatcctctccgggagagggggccaacgagaaagacagtaatagcgtgctataaatggccgttataggaatgccggggagcgatatccaagaaattgacgttgataatggttatgccggtttctgatcggtgataatggtggatgacggcttgggcggtgaccccacatttgactgacgccatcggttccggtggctgtccttattttgatttgtcccgcccctggccgccgacccgtgggccatggatgcatgacctcataggagcgtgtccgctcccgtcggatcccgcaagaaccatggtagcgtgccccgtcaacgtcctgtctgcgccgcaagcccccgggaggcatccgaacacatggaaaggaacgacgacgatgacgccgccgaacgaagtggtgtgggccgggatcgacacccacacggacacgcacaccatcgcattgctcgacgagcggggcaggccgctgggcgccgagacgttcacggcggacccggacggatacgacaggctgatcggcatgctgcccgggccgggcagggtcgcggccgtgggcgtggagggcacgaactcgttcggagcggccctggcccgtcgtctcactgccgccggatacgaggtgcgcgaggtgctgcgccccaggcgaagcgtgcgccgcagggacggcaagtccgatcccctcgacgcggtcgccgccgcccgtagcgtcatggccggcgacggcacgagcctgccgaaaagctcggacggctgggtcgaggcactgcgccacctcaacgcgcagcgatcccaactggtgtcggcgatgaccgcgatctccaattcgacgaacgggctgctcgtcaccgccccggaacccatcagggaacgttaccgggggttgaggagcgagacccgcatgaacaggctcgccgaatgcagaccggccggcggcctggtcgagcatagcgtgctggccgcgctgaaatccgccgccaaggcatggaaggcgctcaaacgacaggccggtctcctggaggaacgcatgcgcctgatcctcgaggaacacgccaggccgctgctcgacatgtactgcgcgggcaccgtcatcgccgcgaccctggccatcgtcgccggggacaaccccgaacgcatccgaagcgaggccgcattcgccaaactctgcggcgtctgccccatccccgcgtccagcggcaggaccaaccgacacaggctcaacaaaggcggcaaccggcagggcaacatggcattgcaccgcatcgccatcgtccgcctgcgataccacaagccgacccgcgactacatggccaaaaagacccgcgagggcaaaggcaagctcgagatcatccgctgcgtcaaacggttcatcgcccgcgaggcataccgggcgctcatcagcatacgcaacggcgaggtcggacgcgggaccccggccgaacgcggcgccaagctgcgcgaactacgcgtcagccggaacatcacccagcaacagatcggcgaggcgctctgcgtgccctcgagccgcatcagcgagatcgaacgcggcgcacgcgaccttcccgaactcgagcaacgggccatccaatggatccactccatcaccgacccaaaacaacacacccaaacgcttgacaatgtataggagcatcataatagaaggtatgcctatcaagatccccagtggccttccggccagagacattctcgactcggagcgcatctttgcgctcgagaagcccgaggcggagcgtcagcgcgtccgcccgctcagactggtgattctgaacctcatgcccaagaaggtcgaaaccgagacgcaattgctgcgtctgatctccaaatcgccgttgcaggtcgagatcgacttcatgaagacctccacgcatgaggccacgcatgtctcctccgaccatctggtcaagttctacgagaatctcgacgccttccgcgacaactactacgacggattcgtggtgaccggtgctcccgtggagcatatgccgttcgaggacgtggactattgggacgagttcaagacgattcttgactgggcgtccacgcacgtgttctccaccatgtatctgtgctggggtgccatgggcgcgctgtacgagcgttacggcatccataaggtggattacgccgaaaagatcttcggcgtattcccccagtatttgcaggatgagtactgcttcctgaccaacggttttgacgaaattgcactgcagccgcattcgcgtctggccggtgtgaacgaggatgaagtgcgggccaaccacaatctgcagattctcacctggggtccgcagtcggggccagggctcatcgccacgcgcgacttctccgaggtgtttgcgctcggccactgggaatacggcaaatacacgcttgccgaagaatatgagcgcgatatggccaaggggctgaccaatgtgccgttcccgcagaactatttcccgcatgatgatccgaaactggagccgctgttcgcctggcgggcacatgcgaacctgctgtggcgcaactggttgaactgggtgtaccagaccacgccgtatgacctgaccgaggttccggggctgcgcgccgaaaagaagctcggcactgatcgttcgattcgccatgagcccggcggtccgcgcgaggatgatttcaagccgttcctcaacgacggctacggcgttattgagggctgatcgttcgcacagtggactgtaatctgttcacgatacggacgattgaatgaacataatcctacacatcggcgagatgcgactaatagcaaacaacactcgcgaagtgccgggaaaagccttacggcagtagggatgagaaaagacgcgccgaggtgggcttgactttgtctagacacaggcaaataatcactcttcagtcattcggagtcgaatgcccagcgctgactccgtgtccacgctcggcagactccgcatcgagacgacgaaagtaacgagtccgtcacattcgcccgcccggtgggtttaaactgacacctgacattgaagaagcaggaggcgtgaatatggtcggttcgttcggcgcaggattgctgttggcgaacgagggcgctcatctgccctcagtcaacgacttcctacccccggagatcctgttccagggcactccgtttgccatcaaccgtattatcctgatccgcatcgtggccaccatcgtattgctgctggtgctcggtattaccgccaaacatgccaagctcatccccggtcgttggcagggcgtggtggaatacggtcttgacttcgtgcgtgacaaggtcgtctatgacgtgatgggcgaggttcgcggcaagcgctacgtgccgatgatcaccaccatcttcttcacgattttcatcttcaacctgtgtggcatcatcccgggtatgaacatggcggccaccgccactgtggtcatgccgctggtgttcgccatctggaccatggtccagtattggatcgccgccgcacgttcgcaaggtcttggccattatctgcgtcacgagctgttcacccccggtgtgccgtggccggtctacatcctgttgaccccgattaacatccttgagttgctggtcatccgtccggcctccctgaccatccgtctgttcgccaacatggtgtctggccaccttatggtcgccacttgcttggccttcgcgcagtactggatggttgacgcggccaacaagctgcagggcatcccggtgggtgcgctgtggttcgccggtggcttcgccatgacgtgcttcgaggcgtttgttgccttcctgcaggcttacgtcttcgccattctttccaccgtgtacatcaacctaagcttcccggaggagtgaggttcaaccccctctttcggaacccggcctcgcctagataggcaggaccgaatgaaataagatttataacgtcgccaagtacgttagaaaggaaacacaatggatatcatcaccctcgcagaggtcgccggcaacctgtccgtcatcggttacggtatcggtactcttggccctggcatcggtctgggcatcctcttcggcaaggccatggaatccaccgcccgccagcctgagatgtccggcaagattcagaccatcatgttcatcggcctggctctggtcgaggtgctggcactgatcggcttcgttaccgccctgatgttccactgatcgaacgttttctcagtcgaatacagaaggcaaaacgaatccaccagtgaaaggaggacttcataatgacgctcgcagaaggcgggattgacctgttcattcccgaggtctatgacatcgtatggtcgctgatcatcctcgtcatcgtcgctgtgttcttctacaagttcttcatgccgaagttcaatgcgatcttcgacgagcgcgccgccaagattcaaggcaacatcgccaaggcggagcaggccaagaaggatgcggacgaagccaaggccaagtatgaggcccagctgagcaccgcccgtgtggacgccgccaagattcgcgacgacgcccgtgccgaagcgtctcacatcatcgccgacgcccgttcgcgcgccgagtccgatgcggcccagatcgccgcatccgcacagcgctcgatcgaatcccagcaccagcaggccatcgtctcgctcaagggcgaggtcggtgctcttgccaccgcgcttgccggcaagatcctcggtgccaagctggaagacaacgacgtgcagtcctcgatgatcgattcgatgatcgacgatctggccgtcaagaagtgaccgtgaccatccgtaaccagaaagggaggtgaccatgcgaggagaggcatcacgtattgcagaccgcgagtcgcgtgattcgctggccccgaaactgcgcgacacccgtgaggacgcgtggcggatcggcaacgaactgttcacgattaccagcgcgctggacaacaacattcagctggagcgtgcactgaccgacccatcccgcccgactgccgataaggtggccgtgttcaaggagatggtcagcgatcaggtgcacccgatgaccacagagatcatgactgatctggtctcccgccgttggagccgtgccagggatatcgccaatgcagtagaggacttcggtgtggacgccatgatgtactacgccgacgccactgactccacgttgcaggtatccatcgagctgtctcgactgcattcctctttgctgaatttgccggttgtgcgctcgaagctttacgacgaccaagcccccagcgaggttcgtgtcaagctgttccgtgagctgttcggagataagaatctgaacaaggtcacgatgaggcttgccgagcacgccacctgcaacctgcgtcgccggcgctatctggaaaccatccagtggctgatcaaaaagttctcccgccatatgggccagtcgatgatcaccgtgaccaccgcagccccgctgaaggaagagcagatcaagcgactgatcgatgtctactccgccaaggtgggacgtcaggtgcacatcaactcggtggtcgatccgaccgtactgggcggcatgcgcattcaggtgggcgacgaagtcacggacaacaccgtggtcgcacagctgcagaacctgcaccgcagggtacagacggaagcaagcccggtctgagagccgagcccatccgcccaacacaagcaaaagacttgactgaacaataaccaatagaaggagtgatcatggcagaactgaccatcgatcccgcctcgattcgcaaggccctcgacgacttcgtgtcgtcgtacaagccgagcgacacccccacccaagaggtgggatatgtcgccacggccggtgatggcattgcgcacgtgacgggattgcctggttgcatggccaatgagctgctgacgttcgaagacggcacgctcggcctggcgttcaaccttgacgcccgtgagatcggcgtggttatcctcggcgatttcgctggaatcgaggaaggccaggaagtgcgccgtaccggcgaagtgctctccgtgcctgtcggcgacggctacctcggtcgcgtcgtggatccgctgggcaacccgattgatggcctgggcgagatccagggcatcgaaggccgccgtatcctcgaggcgcaggcacccgacgtgatgcaccgccacccggtcgacgagccgctgtccactggtctgaaggccatcgatgcaatgaccccggtcggtcgcggccagcgccagctcatcatcggcgaccgccagaccggtaagaccgccatcgcgatcgataccatcatcaaccagaaggccaactgggaatccggcgacccgaagaagcaggtccgctgcatctacgtggccatcggtcagaagggctccaccatcgcttcggtgaagcagagtctggaagacgccggcgccatggagtacaccaccatcgtggcctccccggcagctgattccgctggcttcaagtacattgccccgtacaccggctcggccatcggccagcactggatgtacaacggcaagcacgtgctcatcgtcttcgacgatctgtccaagcaggcagaggcctatcgttcgatttccctgctgctgcgtcgtccgccggggcgtgaggcttacccgggcgatgtgttctacctgcactctcgtctgctcgaacgttgcgccaaggtctccgatgacctgggcggcggttcgatgacgggtctgccgatcgtcgagaccaaggcgaacgatgtgtccgcctacatcccgaccaacgtgatctccattaccgatggccagatcttcctgcagtccgatctgttcaacgccaaccagcgccccgccgtggacgtcggtatctcggtctctcgagtcggtggcgccgcacagaccaaggctctgaagaaggtctccggtaccttgaagatctccttggcgcagtaccgctcgctggaatccttcgccatgttcgcctccgatctggatgcggcatccaaggcccagctgacccgtggtgctcacctgaccgagctgttgaagcagccgcagttccacccgtattccatggagcaggaagtcgtgtctgtgtggaccggcacccacggcaagctcgatgacctcgagctgtccgacgtgcttccgttcgagcagggactgctggactacatcgaccacaacaccgacatcctgaagaccatccgcgagaccgaggacttcaccgccgataccgaggctgccctcgataaggccgtggacgaattccgttcgaccttcgtttcctccaacggcaagccgctggtcgagaagaagccggacgttgccaaggcagcgccggtcgatcaggaaaagatcgtggcgggagagaagtaagccatgggctcgcaactcgcattgaaatcacgcatccactccactgagtcgttggccaagattttcaacgctcaggagatgatcgcgtcttcgcacattgccaaggcccgtgatgtggccctgaacgcgaagccgtacactgatgcgattttcgatgccgtgcaagcgttggtggcacacacccatatcacgcatccgatcgcagtgaaggacgagaacaaccctcgcgtggctgttctcgccctcacctcggatcgtggcatggccggcccgtacacctcttcgattatccgtgaaacggaatcgctgctcgcccgccttgatgcggccggcaagcagccggagctgttcgtgtacggacgtcgcggttcgacgtactacaagtaccgcaaccgtgacatcgcggccacatgggaaggcgacaccgaccagcccggcgtggaaattgctgaaaccatctccagcacgttgatggatgcctacatgaagccggcggagcagggtggagtttccgaactctacatcgtctacaccgagttcatcaacatggtggtgcagaaggtgcgcgtgctgcgcatgctgcccgtcgagatcgtggagaacgaggccaaggtccccgctcctgatgaagaggctccggctgtggcggacgtggctccgctgtacaccttcgagccgagcatcgaggaagtgttggatgccattctgccgaagtacatccagtcccgtatccacgaatgcctgctgacagctgccgcatcggagaccgcaagcaggcagaacgccatgcacacggctaccgacaacgctcataacctgatcgatgaccttacccgcaagctcaatgcctcgcgtcaggcctcgattacccaggaacttaccgaaatcatcggcagcgccgacgcgctgaacaaagaggaagagtaggaacgcatatggctgacaaccagaccacagcggccgagcctaccgacggtcgcgtcacccgcgtccagggctcggttatcgacgttgaattcccggtgggtcatctgcccgacatctacaacgccctgaaagtaaagatcgtcaacaccggcgccaaggaagagggcgaggcaaaggtcactgaaatcacccttgaggtcgaacagcacctcggtgattccacggttcgttgcgttgctctgaagcctaccgacggcctggtccgtggcactttggtctccgacaccggagccccgatttccgtgccggtcggcgatgtgaccaagggccacgtcttcgacgtgtccggcaacatcctcaacaagaagccggatgagaccatcaccgtcaccgagcgctggcctatccaccgcaacccgccggccttcgatcagctggagtccaagacccagatgttcgagacgggcatcaaggtcatcgacctgctgaccccgtacgtgcagggcggcaagatcggtctgttcggcggtgcaggtgtgggcaagaccgtgctgattcaggaaatgattcagcgcgtggcccagaaccacggcggtgtgtccgtgttcgccggcgttggtgagcgtacccgtgagggtaacgatttgatcggcgagatgggcgaggccggcgtgctcgagaagaccgcactggtcttcggccagatggatgagcagccgggtacccgtctacgcgtgccgctgaccgcactgaccatggctgagtacttccgtgacgtgcagaaccaggacgtgctgctgttcatcgacaacatcttccgtttcacccaggccggttccgaggtgtccaccctgctgggtcgtatgccttccgccgtgggttaccagccgaacctggccgatgagatgggttccctgcaggagcgcatcacctcgacccgtggtcactcgatcacctcgctgcaggccatctacgtgcctgccgatgattacaccgacccggctccggccacgaccttcgcccacttggatgcaaccaccgagctttctcgtgacattgcctccaagggtatctacccggctgtggacccgctgagctccacctcgcgaatccttgatccgcgttatgtgggccaggctcactacgactgtgccaaccgcgtcaaggcgattctgcagcgtaacaaggagctgcaggacatcatcgccttgatcggtatcgacgagctcggcgaagaggacaagaccaccgtgaaccgtgctcgtaagatcgagcagttcctcggccagaacttctacgtggctgagaagttcaccggtcgtcccggctcctacgtgccggccgacgagaccatcgaagccttcacccgcatttgcgacggcgtgtacgacgacgttccggagcaggcattctccggcattggtggcatcgacgacctcgaagagaagtggcacaacatgcagaaggaactgggtgcgtgatggccgcggaaaaaaccacgatgaaggtcaacatcgtcgctgccgaccaccccgtgtggcatggcgacgcggcgagcgtgaccattcccgcctccgaaggcggcatgggcatcctgcccgaccatgagcctgtgctcacggtgatcaagcagggtacgctcaccgtggttgagcccgatggcgatcgccatatgttcgaggtgaccgacggattcatctccttcgactcgaacaaactcactgtggcggtcgagcgcggccacgacgtccagtactccggcactgctgagtgacattcacttcgctgtgaccctgtaaaggggctctctggtttccagagagccccttttgctatgtgttgcgctacagtggtggcctatgcgaattattgttgccgactgttctgcggagtactccggccgtctgaatgcctcgttgccgctggccaagcgcgtgctgctgattaaggccgattccagtctgttgattttttctgagctgggctcctataagccgctcaactggatgaccgcaccctgcacgctgaaggacattacgcccgatggtgctgatgatgatgtggatacgccggtgccggaaaaagtgctgcgtgtgagcgccgataagggttcggacattctggaagtgacgttgcagcacatctattccgatgagacgtatgacttgggcgaagatcctggcctcatcaaggacggtgtggaagaccatctgcagcgatacttggccgagcagatcgaacgtatcggcaagggcgctaagttggtacgccgtgaatatccgacagccatcggtccagtggacatcatggccatcaacgccgagggcgagcatgtggctgtggaaatcaagcgtcatggcggcatcgacggcgtcgaacagttgacccgctattgcgagctgctgaatcgcgacccgctattggccccggtgcacggcatcttcgccgcacagaccattacgccgcaggcccaggtgctggccaaggaccgcggcttcacctgcctcatcctcgactacgacgatatgaaaggcaccgaggacgatagcctcaggctgttctgaatgcaaagttgcccccgctggcgggggctgtcgccgtgagtcgactggggatggtccccaacgtaaaccacccccagtcagcttttgctgacagcccccgctggcgggggcaacgctatttgctgagtgtttaatacgcggcgagaatatccactacgaataccagcgtggagttcgcgggaatcgagccctgtttcttgtcgccgtaagcctgatccggcggaaccaccagcagcacctgggatccgacggtctgaccaatcagacccttctgccagccttcgatcacaccgtgctggccgccggaatacatgtcagcctcaagtgtggtgttcttatcccaagaggagtcgaactgggtgccatcggtcagccaaccggtgtacttgaccaccacagtgtttttgtcggtcacttccttgccggtgcccttgaccagtgtctgcgagaccagcgaatcgaccgcaccttgaccgttcatgtcgatcgacggcttgccgttcttggcacgcgtcaccttcggcagattggacggcacatccttgacctcttcgccggtggccttcttcagatccttggacttggaaacgaacgtcatcgccagaatgtaggagtagccggaagaatcctcggcgttcacaccgaaaccgatagtggtgttgagcttggcgcccttgatctggtcgtaataggtcgaagacagggtggaggaatcgaccaggagcgagcaatccggcgtatttttggtccacgtatccatcagctcggtgccgtccttgacattcagggcgataccctgggcgcagacgcggtcaccttcttcgattgtgtcgccgtcacccttctgcagcaccacgtaggagccgtcggacacggtcatcggggctttgaaggagatggtcggcttctcgcccagcttgcccttggcggttacgccggcaatctgattcgccgtcttggaagaggacgacttcgaggagtcgctcttggaatcggacgagttcgagcagccggccagcgagatgcacatgatcagcgagcaggcaacggctatggttttggtcagggtagacaaagtacgcatggcacaccacactaccggtaaaccttgattttcagcctttctaggtaatagacaggtgaagattgtagaatagtaccgttatgagtgttgaagaacaagcaatgggcccagatcaggaggccacggagtctgacgtagtcagtgacgtgaccgactcgacagatgtcatcgatgccaatgacgttgccgatggtactgatactgagagtgccgaaggtgtcgatgctgagagcaccgagagtacggaagacgccgagacgcaaaagtccgagcgcccgactcgtcatgccatgatcatgcgcggcgtggtaacgcctattttcggtttgctagctgtgacggcgattgtgctcggagtgctgaacgccacgatatggaagccttccagcgagatcaccgcatctgccaacgtgaccggttctcgctatgtgattaccgatcccggcgtgctcaccttgttggataagaacacgacgatgaccgtgaagtcctcctcgtccaaggatgagacatgcgtagccttggcctccaccaaggatgcagccggttgggtagcaagcgagaagtcctatcagcgcatcagcggtttgacttcttggaccgagctcggcgttcagaagggtgagcccaccaagaaccaatcgggctcgtcggatgacgccaacgaggtggcattcaaagactccgatatgtggacttccgtgaagtgcggcaatggttcggtgacctttgatagcaaagatcccgccgcttcgaccgtggccatcatggatctcggctcacataaggcgtccgccactatcagcatgcactgggtgcgctctgaagttcccgatttcgccatgccgttctacctgtccggcgttctgctggcggtaatcgcggtgttgtgtgcgtccgtgttcgccatgcctccgcataagcgccgtaagcgcattgtggagggcaaggccactgcgtcaatggggccgtcgttcgcggaacaggttgaacagggaattattggcaacggctcgattccggctgaagtgccgccgaccggccgtaagcgtcgccgccatgccgcacaccgtcgcggttccaagaagaccgtgcccgccgagtcggccgaatctcccacgattatcgatcccgcgtcccgcaatttggtcgccgatcagcagtccggcgaagcgagggagaccgagacgatgccggataccgagtcgacatcagtgatttctcctgatgagttgcaggcatacttctcccgtttggctcaggaagtcaatgacagtgaagcctcggatagtgctgcggccgatgatgtggacaaccaggaggagaactgatgagcatgcgttggaacaagctgtgcgtcgccgccctctccgttgccgcgctgattatgccgttggccgcttgcgaaggtcagctgcccaccccggccgctaactcatccaccaaggctcagccggatttgactgaggcgcaggagaagaagatccgtaccaagattttggaaacgatcgatcaggccgacgcggctcgatccgcggacggctatcagtccgtgatgggcgggcctcaactggagattcgcaccagccaggccaccattgcccagaaaagcggctcaatgtccaagtatgcgaccattcctaaggacatcgcccaggtggtgattcccacggatgacggctggccgcgctcggtattcaccatcaccaccactactgaagatcagcagtccaagcgtttattggtgctgaatcaggaatcagcccgtcagaattacaagctgatggccatggcgcgtctgtttgagggagcgcagctgccgaagttcgaggtgccgaccatcggttcgagaatgggtaccgataaggatgagaatctggtggccacgcctgccgatgcgttgacccagtatgccgatgtgctgcagaacggtgcgaatagcaagttcgcctcgcaattcgcggatgaccagctgcgccagaagatcgccgaactgaccaacaccgtgcaggaaggcatcgcccgcaacaacggcacgcaggagcagaccttcactgccgcgcccgaccagatgtgggtgatgcgcacggctgatggtggcgatctggtcgtgggtcgtgtcgattccgtgtggactcgtcaggccggtgacggacgcgaatcccagcccgcctccgatgatgagaagatcctgttcaacagcgacaagtacaccagcaccatgaaggtcacatacgtgaacgtggtggcgttgtacattccttcggccaactccggtcaacagatcaccgccgtgggtgccgaccgcactccggtcaaggtcgaggcgctgtaagttcccaccacgtagtaatttccccaccgcgatgtcagacgaattttgtctttcgcagaataacgctgttttgggtaaccacgtggtggtgattcactacgtggtgggaatttcaccgcgtagtggaagaatggctacgcggcgggaatcggcactacaatcgattccagcattgtttgattgtcgggcgtgcgaatcgtgcgcgtacatgtggaggcatatatggctgatcagcagcagttcaatccaggagtatcgttggcgggtgctgtcgatttggaagcgctgaagcatcaggtcaaggctgagccaggacaggctggcggcgcaccggcagctggtggctatgtgatcgacaccaccgagaacaccttccaggcgatggtgcagacctccgccacgttcccgattctgctgttgctgtgggtgcccactgacgaccgtcttttctcgatggctcgcgcgctgggcgatgcggtgaatggcctcaatggccagattcagctctcccgcattgacatcgcgactaatccttcgatcgcacaggcactgcaagtgcaaggtgcgccggccttgtttgcgctgatttccggtcgcccgatgccgttgctacagggtctgccgggtgatgatgagctgaagcagctcaccgacgaagtgattcccaagattattcaggccgctgcccagtccggcgtcaacggcactgcgccgtattccggcgatcctgattccgatgctgccgcaagtaccggtgcgactggtgctgatacggagcaggtgcctcccgagcacgctgaggctcatcgcttagccgaggaaggcgactacgccggtgccgccgctgaatatgcacgtgttatggaatccgatccgtctgatgcactggccgcccgcgaacatgccaaggcgcttttgctggcccgttccggttccgcggatgtgcgcgaggtgcgtgccgccgcagccgctgcgcccgacgatgtggaagcgcaactggccgtggctgatatcgatatgattggcggccagatccaggatgcttttgaccgtctgcttgacttcttggccgcaggccataagggcgatctcgaagcggtgcgtcagcgcctgctcgagtacttcaccatccccgagccgaccgacccgcgcctagctcgtgcccgtcgccgtctcgcaaccctgatgtactgattttccttggcttccctcgggtgaggccaagccgtgaagcaaacagcccggtgggctgtttgcaggcgagggcgagacgatagtcgagccagaaagctgcggggcaaagcccgtccttaattgcggctgagctggctgttacgccatccggtttttcccgaaatactgctggaatcgtggcccgtccaaagccagctcctcttcaaagtcgtcggcccatgtgctgaacggcttggcagccagtccgtcattgttgaatcgcgcctgatcggtgatttcggtaacgcagaacttcggaatcgtcagattggttaccggtcccgatcgttcggcctcggccacgataagaggcgcattgagcccgccaaacacatccacactccagccgtcctccgcaatccatacggaatagcggttcttgataaccacttcgccgccgcgcttgatgagttccgcggcaatgcgggcgtcaatctcacgctccacttcatatcgagtaccgcccacggacggtcccttaacggtaacgaaggcctccgagaactgctcgcggtgctcatccagcacggcaatcgggtcgatgtcaggggtcatattgacgctcaccttgtgtgagaccaacctgacgcgcagcgcatagttgtcggcatgcacgtagtagctctggatgatgagggtcgggatgtcgccgtcgttgtattcgtctggcagctcgcggcagaagaagcggcgttcgtattcgaagtcatctgtaggttccgacataatcccattgtagagccgtttacggcgtttccctaggttttgccggtgattggcctcacaatatggtcatgatgccggctgggctgcgctgttcgatgatagtggcttggcgcgggtgatggttggtgtacagtaaagaagttgctcgggtttgtagctcagtggatagagcgtctgtctccggaacagaaggtcgtgggttcgatccccatcaagcccaccagtggggctttcggcatatgtcgaaagcccttttttcatgctcgctcagggttccctgagttttccctgaggacatccatgaataccccatggaatgctgttaggttgggttttaagagcgcataatgaagtggattgaggtcgtggaactcaccccatgaggaggtgtgcgatgatccggaacgggtcgcagcggcattggtcggttcacttgctcgctatggtactggcgctgtctctggtgacgggattcgcggttacggcgggcctgcgtgtgcgtcgcaaggaacagccgttctggcatatgtggtgaagcatcccggaagcgctctgctgcatatcgcccgggcggtgaggcggaatatggccgcatggcgggcagtggcatccgtaagcgtgcctgcgctcggtaaactgctacgtaatcgggttcgctaatccaacaagaggagcacataatgagcgagaagatggaagccgtagctacttcggaggccccggccgcgctgggcgcgtacagccaggcggtgaaggccaatggtttcgtgttcgtgtccggtcagctgggtatcgatccgaccaccggtgagctggcaggggataccgcgggcgagcaggccgcgcaggcgctgaagaacatcaagcatattctcgacaccgccggtactggcattgagcatgtgtgccgtgccaccatttacctgaagaacgttgaggatttcaaggaagtggacgctcgctacgccgaggtgttcatcggttccgtgaagcccgcacgtgtggcctttggcaacaacatgattcccaagggtgcactggtggagatcgacgccatcgccgtggagtgacgtatttgcccccgctggcgggggctgcccggcaatagtcggacggagggggtggttttggccgtgagctgagaccacccccagtcagatgtgctgacggcatccaccagcggggctggtaatgcatggtttgggcgtcggttcgtgccacaatagtgaccatggcatccaaaggaaaaccgtcgccgcgttcggctgtgagcccgctgagcgacgaacaggtcaagcgtctggcaggcagtcatacacttgtggaccccaccaattactatccgactggtccgcgtacgccgaaccagccggagatcaacgcccagaaccccaaggccaccaagcgactgctggccggtgtttccgtggtattccgcactagttgcaagaccaaggcatggggtcttgaccatgtgccggaaaccggcccgttcgttaccgcggccagccacatcaccatgttcgatgtgttcgtgccgatgatgagcctgttccacatgggccgtcgcccgcgttacatggccaaggccgagatggccaagtggccgctgatcggcaaatggttccaattggtcggcatgcagccggtgcggcgtcgctccggcaaggccaagcagatcgaggagacctcaatcgatattcttacttccggccgccccctcaccgtttggccggaaggcacggtgacccgcgacccgaagaaatgggtgatgagcatcaaggagggtgtaggatacattgcgcttgaagcctcccgcagacttggccatcaagtgccgctctaccctgcagtgacgtggggcgcggcttccatcaaccactggtggccgtggcctcgcaagaatgtggtgatgtgctacgacgaggcgctcgattattccgatctgcttgttgacatggattcctggggcgatgaaccgcccgccgaggccgtggacgaattgatgtggcgcgtattcaagcgcatgaacacggtgttggaggagattcgtggcgagcgattcccggcagaaggctattgggattaccgttccatgagccgtaagccgtggcccgaggctggtggccagttcccggcggtggagtagcataacgcgcagttgcgcgcagcgaaaataggaatttgatatgggtaggaaaataacggttctcggtgcaggagtatggacggagccgtaaaggcgacagcccggtgggctgtcggtaggcgacgccgaacgacgatagccgtgaggtagaaaaacagcactccatgcgacaagcgaaggtaggaatttgatatgggtaggaaaataacggttctcggtgcaggagcatggggtactgctttcggccaggtgctggcggatgccggcaatgacgtgaccatgtgggcccgtgaaccggaaatcgtcgaggatatccgggacaatcggcgcaatggtgttcgcctgccgtctgtcaagaagctgccggatgccatcaccgccactggcaatcgcgccgaagccgtcaaggatgccgatattgtggtcgtggccatcgccgcccagttcgcccgtgtggcactcgttgagttcaggggattgattcccgagcatgccatcgtggtcagcctgatgaagggcatcgagcgtaacaccaacaagcgcatggatgaagtggttcgtgagacccttgatttgccggctgaccgctttgccgccatctccggcccgaacctgtccaaggaaatcgccgatcgtcatcccgcagccaccgtggtggcctgcgagaacatcgacaacgccaccatcgtggccgaggcctgcaccaccgaatacttcaaggcgttcgtgaccactgatgtcattggtctggaaatgtgcggcagcctgaagaacgtgaccgcgctcgccgtgggtatggctcgtggtgccggttacggtgagaacaccgccgccatgatcgagacccgcggacttgccgagctcactgctctgggtgctgcggcaggcgccgatcccaagaccttctttgggctggcgggtgtgggcgatctcatcgccacctgtggctcgccgctttcccgcaactacacgtttggctccaacctcggcaaggggctgagcgtggaagaagccactaaggtcagcaatggcgtggcggagggtgtgcctaccacggatgcggtggtggctttgggcaatcagcttgacgtgcccactccgttggcctatcagatgagccgtgtgctcaatgagggcatttcctgtgcggaaatgcttgccgggcttttcgggcgtgaaatcactgtcgagtagactcatagcagattagaagtttcgttcagcagtcaaaggatggttatggccaagaaacgtattgtggtgctctatggtgggcgtgcggatgaacattcgatttcctgcatctccacggccggcgtgctggcggctatggataccgaacgtttcgagccgattccggtgggcatcaccaaggacggcaagtggattatcgacggcgaggatccgcgcggctggaatctggacggcgacgagctgccgaccgtgaagatcacgccgaaatcccgtccggtgattctcgacccctcgcgaggcaaggacggtttctttgccggtgagccggatcatctcagcaatgccgactccggttttggcaccagctttgtgagcttgtccgatcctgagatacatcacgtgctgacctcgctggggcacgtcgatgcggtactgcctgtgctgcatggcccttacggcgaggacggcacggtgcagggtcttcttgagatgatgggtgtgccgtatgtgggctgtggcgtgttcgcctctgccgcctgcatggataagcactacaccaaagtggtgctcaatgctgccggtattccgacggctcccggcattatggtggatgcgcgcgcgttcaccgcagccgatgtggtcgcccaaattgaggcagccggactggcttatccgctgttcgtcaagccttctcgtgctggatccagctttggcgtcaccaaggtggataaagccgaggatctggaaacccaacaggaccgtgtggccgctgccatcgccacggccggtgagcatgactggaaggtgctcatcgagcagggcatcgacggccgcgagatcgaatgcgccgtgctgtgcccgaaggcgggcgatgagcccgaggctagctggcccggcgaaatcgtgcttgaccaccagaatgacgaccagttctatgatttcgattccaagtacatggatgcttccgccagccatgtggaagtgccggccaacctgcccgtcagcgtgcttgaggatgtacgcgacgtggctcgccgtgcgttcaaggccgtagatggagcgggtctgagccgcgtggataccttcgtgactccggacggcaccgtgatggtcaacgagatcaacaccatgcctggcttcacgccgatttccatgtatcccaaggcgtgggacgccacgggtgtgggatacaccgaactcatcacccgtctgatcgaaggcgtgttgaagtaatctcgcaacagcgactacgtggcttccctccttgggaagccatttttttttgacgtatggccgtcgagcgtcaacagttcatgcagagttttcctgagttcagccaacgtatggcaaatggcgaatgcaattcactttcacgccagtgtccggacagattggacgcatagtttcttttcttgggattacgggctgcgcgtatgccgcgcaacgagcccggttcccccagacttttccgtctggatgatgttgagaaaaggaacattatgaacaacctgagtaagatcgcggccggctcccttgccgccgtgcttgcattctccatggccgcctgcggctccagcagcgcctcctccgatggcgccggcgaaagcgccggcaaggccgtcaccgtgaacgggaagtccgccaaggccacttccctcgccgacttcggtactatggaagacctcgaaaaggccgccaaggaagagggtgcgctgaacgtcatcgcgctgccgcacgactggtccaactacggcgaggtcatcgagggcttcaagaagaagtacccggagatcaaggtcaccgagctcaacccgaacgcttcctccaaggaagagcttgacgccgccaagaccaacaagggcaccgacgccgcccccgacgtgttcgatgtcggccaggccatcgccgccacttccaccgatagcttcgctccgtacaaggtgcaggcctgggacaagattccggacaccgccaaggatgccgacggcgcctactacgccgactacaccggcatcatgtccgtgggctggaatgccgataagtacggtgagatcaactctctggacgatttgctcgattccaagttcgctggcacggtgtccttgaacggcaagcccgctgaagccggtgccgccttcaacggctacctgatggtcaaccagctcgcaggcggcgacatcaataacctgcagcctggtcttgacttcttcaagaagctgcaggaagccggcaacctgaccaccgtggacgtgaccaacggcaccatcgactccggccagaccggtgtggtgttcgattggacctacaaccaggcttcctacaagaaggagctcaaggataagggcgtgaactggaagtacaagaccttcccgaaggcccaggtcgtgagctactacaaccaggccatcaacaaggacgcgccgcacccggccgccgcccgcctgtgggaggagtacctgtacaccgccgatgcccagaacctgtggttcaagggcggcgccaacccggtgctgctcgactccatgaaggaagacggcaccgttgatcaggacaccctgaaggacgccatcaccatcgaaggcgacccggtctcctacaccaacgatgactccacccgcatcaccgagtggctccagaacaactgggacaagacgatcggcaactgaggttacctcgcatgactgccgcaatcgcacagaacggacctgctgccgccaaggccgcgggtccgtccgctactccctccgccgcctcgtccgtgctggcgaagcatcgtcaggagctgggcacgcttgcctccacgctcccgttctttgcctacaccgcctgcttcctgctggctcccaccgtgattgtggtggtgggtgctttccaggatcgcagcggcggtttcacgctctcgaatttcaataagatgttcgaagccaacaccgtcgccgcattcggcacctcgattctggtgtccgtggcatcttccgtgatcggtgcggtggtgggtgcgctcgcctcctacgcgctggtgatcggcgccaagccgaacggtctgctgcgtcgcatgatctccgccatctcctcggtgctcgcccagtttggcggtgtgatgcttgcgttcgcgttcatcgccaccatcggcattaacggcatcggcaccatgctcatcaagactctgaccggctacaccgtgaacccgaactggctgagctcgctgcccggtctgatcaccatctactgctacttccagattccgctgatgattatcatcttcctgcctgcggtcgattcgattcgcccgcagtggcgtgaggcctgcgaatcattgggcggcaatacgttccagtactggactcgcgtggcctgtccgattctggctccccgcttcatctccgcgttcctgctgctgttcgcttccgcgttctccgcatacgccactgccgcagccttgttctcgcagcgctcgattctggtgccgttgatgattcagggtgccatgcgcaatgagatggatcctaaccagcagggctttgcccaagtgctggcattcgcaatgatcatcgtcgtggccatcgtcatgctgctgagccacgctgtggaaaagagggccggacgttggcagtgaatgcagaagatactcgcgcgttcgatgctgacggcatcgccggtgctgtcgtcgcgtccaccgtaacgttccccaagcccccgcagctgcgcgccgcacgccgagccaagcaaagcgtcatcaaattcgtgattttgttcgtcacgctggcgttcctgttcgtgccgttgctggccatgctcatcttcaccctgcgtcatccgctctccggccgttggtcggcggctccctggattgcgatcttcaccggcaacggcgaatcgttgggtgccgacctgacagtgctgtggcagggcgttggcacttcgctggtgctgagcgcggtcactgtggtgatcatgctgttgttgttggtgcccaccatggtcatcgtgcatattcgctccaaagccctggagcgcgcgattgaatgggtggccaccttgccgctgaccatcccggccatcgtgctggtcgtcggccttggtccgatctaccgctggttgtctgccgacgtgctgagcaccaacccgatctggctgtgcttcgcctacgtgatcctcgtcatgccgttcgcgttccgcgccatcgccgtggggctcaactccatcgatgtcaagaccctggtcgaggcctcccgttcgctcggcgcctcctggaccaaggtgttcttcaaggtgattatcccgaacctgtggcagtcgattctgtcggcatccttcatctccgtcgccgtggtgctgggcgaatacaccgtcgcctcgctgctcggccgcatgaacctgcaggtcgcgctctaccagctcggccagtccaattcacaaatctccaccgccatgtcgctgctggctctgctcttcggtgtggtgctgctcgttgcgctcgacttgatttctgatgtgatgcgcaagtccaaagaaggtaaatgattatgtctttccgttcgatgtttggccatgaggcttcgcatgaggccgttgccgatgtggctccgactgtcggcaccggctccgatgtgcagcccgtcgcccccgcgacttccacgcaaactgccgccgaggatgcgttcaagaacgatcccaccgctaccctcgagggcgtgcgcggcaaggacgtgaccaaggccgccaaggctctgctcaaggacaccgtcaagcgcggcggtggctccattcagatgcagaacgtcatcaagatctaccccggctctactgtgcatgcgcttgatgatttcaatctggacatcaagcccggcgaaatggtcgtgctgctcggcggctcaggctgcggcaagtccaccgcgctgcgctcgcttgccggcctcgaggatattcagggcggccgcatcatggtcggcggccaggatgtcaccggcgtgccggtcaacaagcgagagatggccatggtgttccaggcttactccctcttccctcacatgaccgctctcgaaaacgtggaattcggtcttgaagtgcgtggcatgggcaaggccgagcgtcgcaagattgccatggagcagcttgagctcgtggggcttgccgatcaggccaagaagtacacacagcagatgtccggcggccagcagcagcgtgtggccttggctcgtgcattggcagtcaagccgcgcgtgctgctgctcgacgagccactttccgccctcgacgccaaggttcgtgtgcagctacgtgatcagattcgccgcattcagctgaacaccggcaccaccaccgtgttcgtgacccacgatcaggaggaagcgttggccgtggctgatcgtatcggcgtgatgaacaagggcaagatcgagcagatcgccgctccgcgggatctctaccagcgccctgccactgagtatgtggccacgttcattggtttgactaaccgcctgcccggagcgtccaatggcgacgaggccgtggtcttcggccagcgtgtgccgctgctcgaagggtcggccaagggtgattccgtggccgtgctggtgcgcccggagaatctgactctgaccgcggccgcacagcatgactcccacgtgggtgagcgtgcgcgcgttgaggtcatccacttcctcggctccttggtgcgtgtggatacggtgatcacctccggcgaataccagcgctggaacaagggcgagcagctcaaggtcacggtgcagttgccggccagcgagttgtcggctgggctcgccgtcggcgatgaggtagtcgtggctcctcgcgcggtcgcagcgctcgcttgctgagcctcgatggggggaatcagccggcagcgtatgatagcgaaaattcactgtcggccgtagctgccgatgtgtgatggtgtgggacaacataaaataatcgctgttttttgcatgttgtcccactgaatttgggacaacatgcctgtcaaacgttatacatgtgtgttgtcccattgtgcttgttagaaaatcgttgcaatgacgccatttcaccgccacggccacatggtgcggtttgaggagcgtgggacgatacgcaaaaacagtctatttttgcatgttgtcccacgcgaaatggctattgccgcacaattcccgactggtatgcctctcggtcttagcgcggttttgaacatactgccgtattcttgaagcgtgtgcataggcggtcctcggaccggtaataaaggggaatccatgagcgaaccgcagacgccgcaaaccgagcagggaactcaaacaacgttgccgcagcagtcgggtaactggtggtttgtggcatatcgacgcttttcgatagtgggcgtggcgctcgcgattatggtggcgttttggattgggctcaacatgctggccaccggtgcattacatcagtttgccggtaacgatgtgcctacgtgggcggtgttgctggcctcctcgggcccgctgtatctggtggccatgccgctcagcatgctggtgttcacgcgcgtgcccgccatcagcacccgccaattcgccatgaagccgggcgaattcatcccgcttttcatcatatgcattcctgtgatgtacctcggcaatattatcggcatggtgctgtctgccgacatcaccgatgatcaggccacgaatcgtatcaatgatctggtgctcggcggcaatgagtgggtgaatgcactgtttgtgggactgctggcgccgatttgcgaggaatggctttttcgcaagcagatcatctcccgtctgcgcaggtacggggaaaagacggctatcgtgttctccgcactggcattcgcgctgttccacatgaatctgttccagttcttctatgccttcggtctaggcctgattttcggctatgtgtacacgcgcacctctcgcctgcgttactcggtgctgatgcacatgctgatcaacctcaatggctccgtgctggcgccgctgatgctcaagcagattgatcccagaatcctcagcggcaccatcagtgaagccgaaatcatgagcatggtgcaaggcggcagcggtatgcgcggattgagcatcatgatgctgtacggcatggtgatgctgggtctcctgattgccggtatcgtgctgctgatcgtcaagcgcaggaactgggaattctatctggctcccgaagagttgcctaccggtttgaaagtgcgcacgacctacggcaatccaggtgtggtcatctatatactgctgaccgttggcctgactatctggatgctattggcgtaagcattttttggcgcccctctttgaggggagctgtcagcaaagctgactgaggggagtctccgcggtatcacggtactcccctcagtctcacttcgtctggcagctcccctcagagagggaagccaagatggttagatgttgtctgctgagccgccgtcttcgacaagataatcggctccggcgatggcgcgcgcggcggcatccgtcacagtggacagcagcacgccttcgcgtgcgaataccagtacttggccggtcatgccataaggcgagaagccggtgaatttgaccagaggcggctgcccttccaaagacacattggcggtcgccttggtcacacggtcgaggatgtcctgactgacagcggccggatcgctggacgctttggcggtgaattccagcgtcgacatgccctcactcaccggcgtcaacttggtcagcgctgcggtattcagcaccgagttgggaatgatcatcaaatcaccgttgcgggtgcgcaccgcggtctgccgccaggtgatgtcatgcacagtgccggtgacgccttgaacggtcaccaaatctccgggctggatcacgtgtcctagcatcaatccgaatccgccgatgatgttggcaacggtatctttcagacccagtgaaatcgccacgcctccaacgccgagggcggtgatcagtgtggtgggattaatgccgaatactggttgcagcaccattgccgcgccgatgacccaaatcgttacacgcgcgaggttcacgaaaatcgaggcactgggaatctgcgaattatccaataccttgcgcagaacgcgactgacaagccggtcggtcaccagcacgaggaccaatacaatggccaaccacgtgagtttgccggcgttcgcttggaaccagcgatcaatatttcctgcatattcatccatatgccttactgtatcggccatctctgaagaagtcgtgagagacccctcggcagaggaagtatatacggattgcctccttctgacgaggaacgtggctgccggaggcggtcggagggggagaccagtgcggaagatcagttatgctgccagcagcgttacgccggtcatggtccaattcctctattcctgatgctcgcggcaggtttgcccgaggccgcgtgccaggcgaatcgggtcgagaatctcatccagctgttcggcgggcaagtcggtgcgctcaccggccacttcgcgcacggtgcggccggtatgcacggcttcggcggcgatgtcggccgcatgctcatagccaatatagtgattgagcgcggcggaaatcgacggcgaggactgagcgtaggcgcgcccgttatctgcgttgatttcaatgccttccacgcagttgacgcggaacgtcgtcatcgcgttggtcagcagcgccatgccggtgagcagctcatgcaccatcaccgggtcaaaggcattgagctgcaactgaccttcggccacggcccagttcacggtcacgtccatgccgaaaatcatgaagcagcattggttgacgcattcgggaataaccgggttcaccttggctggcataatcgaggaccctgcctggcgtgccggcacattgagatcgttgaacccgcagcgagggccggagttcagtagtcgcagatcatcggcggccttcttcagatgcacggcgaggttctttacggctgcggatgtagacacatacgcgcccatatcggtcattgcagccaccggatcaggggcggcggtaaccggcagacccgtgatttgcgccagatgcttggtggcggactggcggaagcgcagatcggcgcaaataccggtgccgatagcggtggcgccgaggttgagctgggccaacaatggcactacgcggtcgaacgcggccaaatcggacttcagcagtgtggcgaatgcgtggaattcctggccgtaggtcattggcacggcgtcttgcagctgggtgcggccgattgtcacatcattgatgtgcttgtcggccaaatcatggaaggccttggcgagtttcttggtggactcggcaagcggtcccagcgcgtcaatcagtgcgagcttgcaggcggccggataggtgtcgttggtggattgcgattcgttgacatcgtcgttcgggtgaatgtatgagtagtcgccacgctgatggccggcgatttctagcgcgcggttggcgattacctcgttcatgttcatgttcgacgaagtaccggcgccgccctgcataacatcgaccgggaactgatcggccagcttgccggcctcgatttccaggcaggcagcacggatggcctcggccttggaagcgtcgatgagtcccagttcctcgttggcgatggcgcaagcgcgcttgactgtggcgtaggcgcgaaccagctccggatgctggctgtcggtgatgccggagaccgggaagttgctgatggcgcgctgggtgtgaatgccccagtaggcgtttgccggcacttccattttgccgatgcagtcgtgttccaaacgggtgttgttcgaagtttcgctcatgttttctatcttcctgtgcgtgaggtggaaacgccagcattgtgcggcgattgcgccttgtgagaaacctcacgcgggtttatgcaaagagccccgcctgttgcggcggagctcttcgttggaggattggattagggtgtgtttacactagttgggttttggctgtgttttttcaggtagatggcgatgaggatgagctggaggttggcgaggaaggtctcgtcgagcctgtcgtagcgggtggcggccttgcggtggtgcttcatgcggttgaagacgcgttcgactatgttccgccctccccgggagacgccgacggactgggagccctctttttcggcgccccggccgcgtgccggtggacctgtggaatctgctgcggcatggcttcgtgccttcgtttccagtcgcgatttgttttgtctggcgacagaaaatcgtacacaggacacgggccatgcccctatctcaggcccagaccaaagtacgcaaaatttcgggcgttgtcccactgttccccatttatggaatcgtaatttactaaatcatgattccataaaccgaacgatggctgtatgcatcttcgagggcggttgaaaccgcgtcgacacgccgaaggggtgctcgcagaaccatggttgctgaaaggcagccattggaattccgccattgtgcgaaacctatccgccgttctgcgagcactccttcggcgtgtcgtcgtatccggcgcgttcctacgagcagagccaatccatgacgttggtgatatggatgccttcgtcggtcatgccctcgctatgccagtcgagggtgagcaccgtgcgggggaatgcgtcgcccaatcgccgcagcggggctaattcccgttcccgggtctgttcctcggtcatgttcaacgtgacctgaatgtactgcttgtcgtttccgcgcttcgcgatgaaatcgatttcgccgtcgggcagcgatccgatggcgacatcgtaaccgcgtcgctgcagttccatgaagacgatgccttcgagctgggctccgcgatccgagccgttgaaacccgtggcgagattgcgaaaaccgttgtcgacggggtagaacttgcgttgcgggcgcagcagttccttgcctcgcatgcgttcctgttgcgcgctgtagacgatgaacgagcgttcgagcgcgctgatctggttgtcgacggtggcgtaggaggcgttcgtgccggcgcttgtgagcgtgttggcgaccttgttgacggagaacaggtttcccgacgttgagaacagatatcggctgagtttttccaatgtggcgatgtcgcggatgccgtaccttcccgccacgtccttcatcacaatggattcgtagattgaggtgagtatttcggtcgccctgtcctggtccggctggccggtgacgaacaggccgggcatgccgccgaacatcatgtatttggagaacagctggtccgtggaatccgtggttccttgagcccgatgatggcgttggtattcgtcgaaggagagcggatatacggggatggtgatgtagcgacccgtcagatgggtcgccagttcgccggatagcagccgtgcgttcgatccggtgatatacacgtcggtgtcgtcacgggaatgcagccggcgaaccacttcctcccatccgggaacgtcctgtatctcatcgaggaaaacgtagaaggggccgggtcgggcttcttgcgtggcttgcatcaggtcggcgtgcaggtcggtcgccgaatatccgatgggcgtgtcgaaggaatcgaagcgacgggtgaagatattgctcgcgggaacgccgtcgtcgagcagtgattgcgcataatgttccagcagcgtgctttttccgcaccgtcggacgccggtaagcaccttgatttccggggtgttccggtggctgcgcagcgtgtcggtgagcttgtctcgtgcgatataccccgtcatctccacgcctccaatttttagtgtattgcaaaacagtcgttaaatcgacgttgattttcagtatacttgaaattatgcattctggagtaatgattctatagtgtactcaaaatcgtgtggtgggtgtcgtctgccgctgtcggccggcggatgctgtgatatcagggttccgttactgtttgagcggcgcagccactgttccggtgttctgaccgggacaaacgcatcaagaccgaatgcggcacaagcatcatggaccacagacgcgagctcggactcgtggcataatcaaactacaggaacaaagaagtccaagaaaacggcaccaccgcggaaacaaacctaacgggagaacgccccttccatacccgcaaacaaaccagccccgacaacgccaagactcgacaacccaccacacaaactggcgaagactcgaaaataagctatcggcgaacatgtcaatgggggggggattaaatgaaaaaaatttccagtggaagttgggttttatcactggggaggcgcagtggggatttcctttttgttcagagattcctgcggacacgaggggaggcttctaatgcttggccaacagcgcgccattagggttttgtttgtcgcgcagggattgagtctcgctgcgatgagcgttgacctaacggtcactgcgctcgtgggcggcgagctggccccgttcgcgtggatggcgacgataccgatcgccctgatcgcgttggggacggtgttcgccaataccttcgtcaatcgcctcatcgcccgcatcgggcacaagcatgtgttcgaggccggggcggtcatcgccatatgcggcggaatcagctcgttctgcgcggtatggttccacaatttcccgcttctgtgcgtcggcacgttcgcggtcggcatctatcaggcggcctccaactactaccgatacgcggcggccgatctcaatcccggcaagaaggaccgggccgtatccgtggtgctgtcggcaggcatcatcgccgcgatcgtcggcccgctgttggcgacatgggccgaagacctgttccccgtccactacgtgggctcctatctcatcgtaagcatcctcggcatactcgctctggtgacggtggcgatgttccctgcagaccagcgaatcggaagcacgcggcagtccgttggttcggcgcagaaggtcgttctgcttgatctgctgcgccgtcctcgctttctgctcggcatctgcctgggattcaccgcgtgctacgccatgaccatgatcatgtccggcgctccgctggtgatggaacatgtgctgcgcgaatccgacggcacgcgcatgcaggccatgcaactgcacatgctcggcatgtatctgcccatggcattgattccactgctcaactccaagaaacgttctcacacggtctttgtatctcttgctttagggctaggacttgccagttgtgtactggggcttggccagaacgcgccgctcgtcgcgatggcattgctgggcatcgccgttgcttgggcgctcggctacaacgagggcacggtgctgctggtgagttcgtattccgccgacgaagtggcgtcagccagaggcaaaggcgagttcttcctcgtatgcggacaggtcatcggcagcctgctggctggccccgtcatcgagttcctcggatggcggatcatgctggcgatcctgacgctgctgtttgtgctgacatccggtatcgccgtcaacagtcgaaaggctattgcctagttttaaaaccagtgggaattggcgaaaggtcttggaacgggaattccaagacctttcgtcgactttgcttctcggtagcttgtattcttgcgatgatcagcggcttgtcagcatcggtcgggtagggttcgactcccgttgtccgctccattgcggcgtccgctcagtttcggcaccttcaggctcatcctgccggccttgacggtcaggtcccgcccgtaatggccggccccatacgctttgcggcccccgctgcgctcgtagcgcgcggcgccggtgatctcgtcgccctgaagcgtcgagcatcgcgttcaacgtctcctcggcgctcttcctgaccatccggtccagggtggtctccaacatggcctgatcgaccccgtggaatctgctgcggcatggcttgcatcctgctttccaatcgcggttttcctatgtctggcgacagaaaatcgcacacaggacacgggtcatgcccctatcccaagcccaaaccaaagttcgcaaaatctcggacgctatcctaccgaagttcacgtggtatccgacggcgagagcacggtcgtcgagatccatctgagcccgggcaacgagcacgacgcggcccacgggcgccgctcgatggccgcgctcggcgcgtccgtgggcgcgcacctgctcatgggccgcgcgtacgagggggattccacccggctgccggccgagtcgttcggcctggcgccggtcgtgtcgcccaagaggaaccgtactgccccatgggattacgacagggaggcgcacaaggggcggaacatggtcgaacgcgtcttcaaccgcatgaagcaccaccgcaaggccgccacccgctacgacaggctcgacgccaccttcctcgccaacctccagctcatcctcatcgccgtctacctgaaaaacacagccaaaaacccaactagtgtaaacacaccctagttgtgatggccggcagcagtattgttgctgttctgtggaccgtgtgcaaagatgcggttccagtaatcgagcatgtcttcgcggctcatggccagatagatgcccatggccagcacggccacgtcttccttgagcagatccttgatctcgatggtgccgctcagcttgggccagcgctgaagcactgcaagcatgccgcctacggtgaattcgatcatgagatcggttgtgaggtcaagatgttcggggtctcgttgcagcatgctgatcatctgcagtcggcagaaatcgcgcagggattcagtcagttccagcgtgctgtgcgggccggccagcagagccaatcggtcgaggcgctggcgctgttccgggttggcgagcgtggcggtgatacgttcgcgccactgctcctcggggttgccgttcgggtcgggggtgcggttgatcgggatggattcgacctgatgcagaatggcggaatcggccagttccggcagtccggagaagtggtaatagaacgaattgcggttgactccggcctcgcttaccacatcggtaacggtgattttgcggtagtcgcggtcggcgagtagttcccagaaagcgttttcgaggcgctctttggctggcagcacctcggaatcatgacgtggacgcggcatctcttcctcctgacgcattgcgctaatagtcatgctgtccaataagttattggacactataactagtatctctagacatttgtgggtttatcgttgggttcgttcttctgctcggtagcggatgtgccgtttggttcgtcggcgtctgccgctgccttggcgttggcggaatctgtcttgtgtttggcggtggcggccttgatcagaatgggcactgcttcggctaaatgccgccgatcctcgggggtaagtcccacgaacgcgccaagcatggaggggattgaagcggggaaattgctcatcacttcgctaaacgtcgtggcgccattggagtgcagcacggtgaacagggcgtccactgcacgctcgcgctgttccggcgtaagcgcgccaacccaatgattcaactcttcgttgaacagttgggagctggagctgagatcgggctcggtgacgaactgatcgccgtccaccagccaggtgaatgcggaatgctgcataatgccgtccgaatcggaagacaccacacggcatggttcaggagtctcgaaaatcatgcccacaatcgatgagctcggcacgattttcgtcacctttggctggatcctgcggtaggcggggctggtcacgatttccgaggggaagccggggccgtccagcgaatagatatgccgaatgcggttttggactttggcgtcggcgttcatcgccgcataaatcgccagattgccgcctttggagtggcctaccagaacgatcggaccatcccataggcgggccaccgtatccagatacgcgctggccgcgcgttgggccggtactgggtactggaaagccatgttgaaatcctctttccagccgattagcgaatcatcggttccgcggaaggagaggaccatggtgcctttatgcgtaggattgcgacggttgcggccgtcgggcagttggaacgttgcggcggcgaattgggtttgctcgccgcggttgacatgctctacgacggctcccagccgtatgccggcaaagcgtggattattgccggcctcctcgaacagggtatgggtgagatgtgggtcgatcaccgagaccatttgggcttcgtggggtttgtcgtcttccgatgtatcgattgaacgatgcaattcttggttggcctcttcgaggctgattgattccattgccggatgccagagccctttgagccatatcaacggatgttcgggctcaaatgcgcggatgcgagtggcgaaggagccggattgctgctgctcgtcaagcatcagcgtggggcagatgttggccacgtcttcatagatgagtgtggcgataatcagggcgtcgatttcattgaacggcaattcggagaatgggcgcaattcggtgcgtgcatagtcgatgatgccggtcatacacgcctcctgattttgcttatggccctgcggtcccaagttcatgcacggctgcggtttgcctgctgccgtgtgccttccattgtagggattgtatggttgccgatggtgcaatccgccgatggcgcactgatggtgaacaattccacatgggtttctcggcatgactcgggaaattgttgggtagttggggcggagtcctgtgccgagtgctgatcgtcggttgccgattgtcgattgccagttgtcggttgccggttgtcggttgccggtgggcgttgaatgctgatttatgccagccggatattcggcaggtcgaatcgcgtcatatccacgccctcgtgctcgagcagttcggccttgatgtcgagccggccgccatagccgccaaacgcacggcctgatccgaccacgcggtggcaaggcacgatgatggtgattggattgtgcttgaccgcgcctccaaccgcttgcgcagccatacgccctccgccgcggcgttcggacagctcggcggctatctctccgtagctggccgtcatgccgtaaggaatttctgcaacgagttgccatacttcgtgctgaaacggagtgcccgccggattcattggtggggcctggctgaggcttgggcgttcgtctgcaaagtaggcctgcagccagtcgcgggttatgcggaacacctcgagttcggaatctggcgttccattgtcgtgctgctggttcttggtggcccaccaccagtcctcgaggcatagttcggtgagcgcctcaccgtctgaagccatcatcatccggccgatgggtgtttccacggtggtgcgtatcaattgccgttgtgccatacagccattatggcgtgttcgcgcggctttctgcctttcgaggggctgatttacgtttcttcggaggtctacttccgtttcaaggggctggtgtccaagtagacgaggcgcaaaaacggcggaatggcgttggcgttatgctgtggatacttgtggtgcaaaggatgaccagcccctcgaaacggagatagatattcggaaaagctcaaatcagccccttgaaatggaattagaactcaattttgatggaacgtggaacttgcgcgcgaagcggtggacaatgggaaccatgaacacatttggtttggggcatgacgtggtggatgtggccgcattcgctgaacagttgggacagccgggctcgcatatgcgtgctctgttttctgtgcgcgaggtacggcaggcggcggaccgcgcacgccaaaaaaacgatggcgaagctgtccatctggccgccaaatgggccggcaaagaggcgttccttaaagcgtggtgtgattttctggagagtgcgccgttcccgttcacgctggataatttcccgtggcgcgagattgagattctcgatgattcgcgcggtgtgccgcatgtgtcgctgagtggtgacgcatcgccggcgttccagactgattactcgggttcgatccccgacgtccatatctccctgagccatgatggcccggttgcgtccgccgtggtgatgattcaatccggtaataattcgcgcgaaatccgctgaacggtgcgaaatttcagcttctcttcggcgcgtcctcggttacatgcgtcgaaccggtttgatatagttgacgcaacgtgtcaaacgattgacgcgagcagcgggcagagacgaagaagtttccggtggctcagagcagccagtcggcacaggcagagaagtcaatcgcgcagaataaggcaaagaaaaggcataccggcactgttttcaatacccgcttcgcagctcataaggatgaacttgagcggctcttcatgagtctgtacaacgaccatgatgccttcggatcgctcatcgacagcatggctgaggcctatgctgaccgtcccgccgatctgaagcgtctcgacaagtcccgcgaacaagacccggattggtacaagcgcggcaacatgttcggcatgaccatgtacaccgacctgtttgccggggatctcaagaagcttgccgataagatcccgtaccttaaggagcagaagctcacctacctgcacctcatgccgctgctcgacatgccccacccgaacaatgacggtggctatgtggtccaggacttcgacactgtagacccgaagctcggcaccaacgaggacctcgccgcgctcgccaagaagctgcgccgcgccggtatcagcctgtgcatcgactcagtgagttatcgtttttcgtttttcccccgtgcgcgtcgttcaggccgtcggcgcgatgagtcgggtctcacctttcatcaatttggatgtcaatccgccgaggagcggcatgaggaatacggtcacggcgccggcagccaccagcgttgacgcggtggtttggtgcatggtgccgccctgcaccgcaagagaagtcacggccacaatcagcggcagagccgttgtgcaatacagcgaaacggtgagcttatcctgcgggtcgagtgggttgactcgatggtcgagcgtcgtggccacaaaaattggcaccgcgtgcaccagcagcagcatgatgatgaaggtgatgagcagtgcaggattggccacgaccgctttcacgtcaatggatgcgccggaaaccacgaaaaacacgggaataaggaagccatagcccacgccttcgagcttcaggttcaatgtatggttgccgttcggcgtgacgaatcgcaggatgaagccggccgcgaacgcgcccagcaccacatcaagctggaacaggaacgccagacccagttcgctgagcagttcaacggctttggtcacccagattttatctaggatgaatggtccgaatatcgccccgaacaccagcagcagcacggtctgcggcatgggtttgccgggaataagctgcgtgatgatagggcacgccactgcaatcatcatgatgatggataacgagacgagaccataggtcatggtctgatctaatcctctccgttttcttgaatacgtttcggcagtgtagttcgtcccgttgtctcgaagcggtcatgtagtcttgccgtgtgacaacccggcgacaggcgcggttgccatccccacagaaatatgtataataacccaagtcgccaaaagcggcgtttacgcggatgtagctcaatggtagagcctcagtcttccaaactgattacgcgggttcgattcccgtcatccgctccactatttatatgttggtgtatctaattgggaataccggaagggtgagctaccccgagtagtattagcactcatggtgttgagaatcgacgaagctgaactgcgtgccaagctctttgagtacaaagagcagattggtttcggcccgattgccaatggggttgtcatcatcatcgaaggattgtttttacattcctgctgctctcacatctggactcgaccaaatttttcaaggattgctccttgcattgagcattatcttcatgttctatggagtatggagtttgattactgcttgcagaaataagtatgatgccataacactgtatgaggatatcgccaacatggatagaaccgaacgaagaagctcgatcattgcggtgaaagacgctaaccgatatcttctgtatcgtgatttaggttggggatgcgactttttccctaatcatgcaaccgcaagcagtactgatgaggatgttcgtcagctgacgacgtattttgccgatgaattcggaattcctgctaaagactttactctgtctcacatttgtgtgaaggattctgagaagccatccgcggagcatgatggagaggttcgttattacgaatacacgctataccgcgctagcgtaacggtaatgcctgacgcctggcgttccactgagttccatgttggtgccaaggactgccgctggatgactcttgatgagatgcttgccgaccctgtcatcaacaaaatcaatcatgatgtcgttgcgatggtgcgggataacttgtaattgttgccgcctttggggcatatggttgttgggccgaagcgcgttctatacctcgataatcatcggaatcagggcgcagcatgctctatggaactctctataccctgaaaatactgaaaatcaggatatagcgcagtagaacagaatctgcaaacagcggtatgccgaggaatgaggtcctcttcacccacgacgtaacgcagattcgtatcttatggaccttatatataggtttgtggccaaggtgctacccacaacattgcccgtaacgccaccgcccgcaacagaacacggccttggtgagtcgtatgtttgcgttcacagaaattgcatgtagtatgtcttcgcatatgcgcaacgacgtgtgaccgtgtgacattgcacacacagaacggtggcatgctgacggccgacggtaactccgcgccccacgtagcggcagcaaatctgcccctattcccgaattgtgggagcagcacgccccgcaggggcgaaaaagtccgttatcgtagggtggatgacgagggtgccacttttcaaaaattccaaggttcttttcaatatcgggtaagaatttccctctatccgggtggacgcattcgtgcttttgcttaataacgtaacgccttgtaggtgtgacgccaggctttggcgtacgcgatcgtaagagacaggcaaggctatgaagagaattgcagaatggttcgctgcggtaggggccgcagcgagcaagagtggcaaacggctagtggccgtcgtggccgccgtagcgatgcttggcggcgtcgccggcgtgagcgcgaccgccatggccgatgaccagtctgcggccgatacccagcagtccaccgcccaaaccgaaactccggcaaacaccgacagtaaggacgccggtacggataccggtaacaaggatgattcgaccaaggccgatgacgccgcaagtgccgataccgatgctgccgcctcggaactcaccaagcagacggctcctgctccgacttcgacgttgaacacgcaggcagccgaagccacgaatggcagctgtgtgtatgcaggtaacgttgcctctggactgaataacgtgtgctggctggatatgacgaacttcaccgcggacaaggaccagcttcagcccatgagcgtgaagctttcggactcgttgacgatgaagttcaacatcaagtatacgggtggtcgtaagttgcgttcggccgccgtgcctacttggaataaagcggcgttcggccattacggttatgccggtttccctgaaggaaccaagcctgctctgtatcagataaccggatcttacaataccgagtccacggtagagctgacggacatcaagatcgtaaatgctgatggcagtgaaatcaccggcaattattcgtttatgatggcggatgccgagagcacgaacaacaatgagagtatctcgttcacttcttcaaacgagatcgagcaagtggcccagttcccgcaacagggtgatgccgactacaagaattatgcgttcggtgttcagacgttctccgctgaccacaagaccgtgaccggtggtggtgtgagtactggtgccaatccaggcatatacctgtacaagaccaagtcaccggataccgtatcggtgacgatgggggtccattatgggcgcgagattcaggcggcgatcttcggcgtgctgttctccagtgcggagaccactgtgaccacgaacaacgcttctgatacgtttgctggcaaggtcgagtcgcagacctatggttctgagcagaccggtggcgtaaccggttctaattccgctaccagcaaagtggtgaacatgctgtcggatacggacacgtccgaacaggtgaagttcactctgtccgccagcgaaaacactaattggaatgattacaatgtctcgttcacctgtgatggcgattgcggtgaatacgatgcaactcctcagattgatactgcgaccggcaaccggtatgtgaccgtcagcgtcgcgtcagagaagtccgcgcatggtaagtgggtcgtgaccaagaaggtcaagctgggcaccccgaagattcagaagtcgatttcgaaggatgaggtggattctgcggctactggtcagaaggattcctacaccctgagcctgaatgtcaagggcaacacggtctccggtaccacgacttccagtgaaaaggccaagatcgatgtggcgttcgtgctggatacttccggaagtatgaacgacaaggttggcaattccacgcgtctgaagaacatgcagaatgcgattaccgataacggtggtttgtcgtctgcgctgttcgactcgcctgacaagattgacgcgcaagcgcatgtgattacgttcgcgagcggtcttggattggatggtacgtcagtgctgtctacgaaggccgacctcgatgaggtcgttaacgggctgaccgctaacggtgctacccattgggagaagggtcttgagcaggtaagcaatatcagcacaaggcctggcgcgaccaagtatgtcgtgttccttaccgatggcaaccccggtaaaaaaggttggaaaaaggctaacgtctacagctgcggtgtgtttggcttgcagacatgtgacgataacgattccgcccgttccgtatataacgcttcggtgatcgctggtaaacagttggcgaaagctggctggaacatacttaatgttggcgtcgacatgccgacgacggtgtacgtgaatccggaggctgactcggttagcggaagcaattataaattgcacaatcattcgttcagccagactgctggttgggtctctcctttggaagcactgactgcgcgtgaaaatgacaacaagtccaccacggtcaaggaccagctgattaaggcttacccgaagaccacttccagtgagttggctcaggtgttcaaggacctcggccagatcatcaccacgaccacgacgaagtcgtatggcaaggtgagtatcgtcgataccctgtccgactacgccgacccgttgtttgagtatgacaagcagtctggtgagattacgtctggcgttacggtggttacgagtgacaggtcgaatgttgatgccgaagtggcgtccaagacctatgatgtcgctacccgtacggtgacagtgacgttcagggacggcttcacgctggccaaggacgtgacctattcggtgcagttcaaggtcaagccttccgataaggcgtatgagacgtatgcgtcgaacaagcagtccgaaaagggcggctacacggatacggataacaccgtgcatcagggtgaaactggtaccggtacagattcggaaaacaaggacggtttctattccaacgcggaggcccatttagcgtattccgagtgcaccgcagtcaacaatgtcgcgaaggattgcgtgtcgaaggataacgtgacatatcagaagcctgtcctgcaggtgaagaccggcaagattcaggtgaccaagaaatgggatccgaccgattccgagccaaaggatggctcgaaggtgacggtcaacatctacaagggtgaccatgccgacgacggccagaaggtcgataccctcaccctggccaaggatggtggctggactggttccttggggaacttggccccaggcacctactttgtggaagaaaccaatgtagacggttacacggcgtcctacagccagagccagacggtgaccatcactgccgacgatctgtggaaggctgagccgaacatgacgaagttcgacaacgttaagacatatgacgtgactatcacgaacacgttgaaccgtgttgatcttgatgtcaatgcaaacgtcaaggtgagcaagaccgtgcagggtgccgccgcgcccaaggacttcacattcaacctgacctgcgccaaaagtaacgccgcgtgcaaggatggcgtgacctggccgaaggatagcaacggctcgttgaccgcgaccgcgtccaagtccgacttacagaccattggcaccccggcggatgccaagttcccggacggttcgacgttgcagctcaaggccccgaccggtacgacttcggccgtctacgagttcacagtttccgaggatcagtcgggcaatcccgcgggctggaagtacgacaccgatacggtgaccgtcaaggtcacggtgagcaagaagactgacggctccggctacaagaccaatgtcgagtacgtgtacgccgacggcgattccgataagacggataatccaaagtcggctgacttcacgaacgtctttgtcgccgtgtctagcttgccggtgaccggtggccgctcggcccgtgactggctgatctacggcggtggccttggcctgttggccttgttggccggtgccggctacaccgtctggcgcaagcgtcagctcgtctgacccgaacagcctgaggcggactgaggggagtcgacaaaggctcctctccccggagaaaacacattaaagatgtgcggagattgcgaagtcccttggcagaggggccggagtctccgcgattgcagaaaacaagtacaaagtaaaagaagtgagggtttctcatgaagttgaggaagcttttcgcgggcgtcgctgcggcggcaaccctgttgggcggcatggcgttcggcgccaccaccgccaacgcggcggataccgcgtccatcaccctgagtggcaagaccgtgaagggtaccgtgtacacggcgtacaagatcggttcctatgacactgccggtgcgaaggtcgagaaagacaagctcgcgtccgtcggcgtgacgacggaccaggcttggaagacggatgccgagaacgtgctgggcgccacagtgactaatactccggagtacaagggctacggtgatccgctggcctatgtggcgggcaccaccggctactacaccaacaccccggcaacgctgccgaacgcctccgcgaccatggaatcgttcgtccagggcctggccggcaagctggatggcaagacggccgtggacccgtcccagacggttgccaatgataacgacaaagtcgtcttctccggccttgacgagggcctgtacctgattgtttccaagacggatactgaacccgccacggacgccggctccccgctggctatcgtcggcacccaggtgaccgtcaacggcaccgcgtacacgaagttgggtgcgaacaatcagacgctgggcgaggccgtggtcaagccgtccaccccacagaagccgagcaagtccgcgagtggcctgaacccgtacgtgggcgccaccatcacttacacgcttgagggcaccgtgccggccaaggccaattccttcaagttcgtcgataccccgagcgctggtctgactgtcaagctggataccctcaaggtgaacgttcagggcgaaactgacccgctcgccaacaccgagtacacggtcgaccccgcctccggcgactttaacacctccactgctaagccgtccttcaccatcgcgctgaacaacgctaccaagtaccagggcaagcacatcgtcgtcaagtacaacgcgctggtcaacaagaaagccaacgtcaacggcaccaacaacgatgtcaggttcgacaactccaaccagaccactaccaccaccatcaccccgcagctgaacaccgtgaccttcaccaagaagggtgtggatgccgacacgaatgctctgaagggcgtcgtgttccagatcgtggctgatacgaacaacgcaaccccgctgccggacggtaccgcgaccgaggccacctcaggcgacaaaggtgtggtcacgttctccggtctgccgaacggcaggtacaccatcaccgagaagaccccggccgatggctacctgaccaccgccctgccttcgttcacagttaccgtcgagaacggcaaggtcaccgacgtcaccccgacgggtgtcggcgccggcctcgtgaccttcgagaacggctacgccaacatcgtggtgaagaacgtcaagaagatcacccagttgccgctcaccggtgccgccggaaccatgctgttcaccgtggtcgccgtgctcctcgccggtgttgccgcgactgtgttcgccaagtcccgctccaccaatcgcgccctcaacgcgtgaatcgagagcaaataatctgccgtttgattatcggtagatgttcaagtgaggctcgttccgaaggttgcttcaggacgggcctcttttttgagaaaaaggagttgtttatggaacagccggcgaagagatattcaagccaagatgtatggaacagacatttgtatggtccaaccatattcgatcgtatcggtaaggattttgacaagagcggctatgacttgcattggctgcgtgatgcgctgacctctgcctatgacgttcaggagagttgcaggtcgagcgtcaatgaaaagcttcggcacccttacacgttatcggtgttggagaaggcgcgcttgctgtgtgacgcgcaagataatcggcacgcgtccagtataggtattgttgatattgcggtgctagcattgtccggttttgccgtattggcgtcagtaatttctacgtacaaggatatgaatatctctcaggagataatgcctgctaacttgatactgcttattggactcatcgtgctgtttgccattcttatgggtggagtaattcatctattcaggcgggacaatcggcgtgacaggcttcgcgaagctttggctattctcattgcggaggatgaacgaaccgcgaaagaaaaggaacaggcttcggatgaggagctccgccaactgattcataatccgttggcgattagtgtccaagccgctagcgctgttagtgataatagtgctgctggcggtactgctgatgctggtaatgatgatggggatggtgacgcttaatagcgtctattttccatagtcattgcctgagggttcgacactcaagcatacataggccgtcataggccgttctgcgagatatggagggccatcagttctggacactgatggccctccatcatgcttccctatcgtttccctcatctcaatatcggggatgaaacctaccctactaggggttagaaaagtccgtataacaagtactatcatcccaaactatgacatgcccccatattcaggggatgcgaacgaaccttccagagatgtaggggatgaaaatgactgtcggtggaggggcctttagccccgaagaggtcaagtacctgaagtcgttgccggcggtggcggaagccacttcgaaacgcattacctacactgacgacttcaaacggtattgcgtgatccgttataacgaaggtgcctcaccggtgcgtttgttccgtgaggccgggctcgattccgccctgatcgggtacaagcgcatcgaacgttgccttgcccgctggcgcgaggcacaggatgaaatcctgggtgccgaagcgccggaacccgccgagaaaaacagcctggggggggggtatcacattcgaagttttatcgatcgggaaccgctggaacgtcagatactgcgaacgagtggcgtgagacggagggtgccgcgattgcggcgaaagccggcagcgaatccgatttccacgtatctcctgaacgccgcgccatcatcttccccatctcccgcaaagagcagaacaatgatttgcgtgacctgctgattgctcagcaagtacggcgtatcgatgagctggagcggcaggtcgatatgcttgaggctttgctgcatagcgggcggcgggggagcagagcatcatcttcctcgcttccgcaacgcgaatctggcgagcggggctcgtctgcgggcaataatgacgttgctcccacggattcggatagggagaatcgtaacgaggaccacggtgagggtcatggcgagtaatcgatcgtatcggagacttgcctaacacacacgctaagatgggcatcgcaatacatggcaatgagcaggtaatcggcgaggcggtgcatggagcaggaatccaacgagcaagaacctaacgaggcgacggaaatcgtgggcagcaaggtggagactgtcgaggtttccaagcatcctgaagcatccattcccgaaaccgacttgtctttggcggatatcgaacgtcgtcgctcgcaccccgtgcgctgggcggtgaccattctggccgtgctcgccgctatcatcgccccttattggctcggtcgttcgttcgccgtgaacaacaccgaagctgtggtcgccgcgctgggcgacgtatctgcgcagggtatcgcactggtcggttggactgtagtagtgattgcttacgtgggcctggtgatggccatcgtcgtttccccctcgtggccatggctgattgtgttcgtggtgggccttgcggccgaacagttcattgctggcctgagcatgctcaatctccatttctggtattcgacgtatgtggtttacggcgaacaatccaacatcgcgaatgcggcgaatcttggcatactggcagcggcaatcggcgttgccgtgtacgccgtgatattcgtgggtttgctggtggtcattaagaaaacctcgccgctgaacgtgctgaccaaaagctgggccagctttattctgtactttgttatcgaaggtgtcgcactgttcgtggtgctgtttggcggactgcttaccgcggtgtgaccaatcggctggttggctgtctgtgcattgccgtatagttttcatttggcgtgatttcgcccgcggatagagagcgtttcgagcgcaccgcccggaacaccgcgcaacgacacaattaaggaggatgccgtggcactgacggctgaagagaagacccagattatcaacgagtacgcgacgcacgaaggtgacaccggttcccccgaggtccaggtggctctgctgtccaagcgtatcgccgacctgaccgaccacctcaaggagcacaagcacgaccaccactcccgtcgtggtatgcagctgatgatcggtgatcgtcgtcgtctgcttgattacctcaagcgcgttgacatcaaccgttaccgctctctcatcgagcgtctgggtctgcgtcgataattgaagacttccgcccgagtacctaggattggtgctcgggcgttttacatacgccagccaacggcaacaacggcaagagggttagaggataggccgaaggcaccacggtaaggtgcggccaacaagagaacccgaatgaaggggttgacacgaggaacggcggtcaaggggccagccgaaacaaggtatgtgacgtccgctgaagaggacagtcgcggtgcggtagaccgcggcacagtttgtaggaataagaaaattaaagaaggaggaaccctaatggagggtcccgaaatcaaggccgttgaggccgtaatcgacaatggaacgtttggcaagcgcacgctgcgcttcgagaccggccgcctggcacagcaggctgatggtgctgtggccgcctacctcgatgacgattccatgattctgtccaccaccaccgccggctccagcccgaaggagaactacgacttcttcccgctgaccgtcgacgttgaagagaagatgtacgccgccggcaagatcccgggctcgttcttccgccgtgaaggccgtccgagctccgaggccatcctcgcctgccgcatcatcgaccgtccgctgcgcccgctgtttccgcacacgctgcgcaacgaggtgcaggtcgtcgagaccgtgctcgccgtgaaccctgatgacgcctacgacgtcatcgctctgaacgccgcctccgcctccaccatgatttccggtctgccgttcgaaggcccggtctccggtgtgcgtctggccctgatcgacggccagtgggtcgccttcccgcgctggagcgagcgtgagcgcgccgtgttcgagattgtggtcgccggccgcgttgtcgagaacggtgacgtcgccatcgccatgatcgaggccggcgccggcaagaacgcttggcacctcatctacgacgagggccagaccaagcctgatgaggaagtcgtggccgccggtcttgaggccgccaagccgttcatcaaggtgatttgcgaggctcaggatgagctcaagaagatcgccgccaaggagaccaaggaattccagctcttcccggagtacaccgacgagctgtacgcccgcatcgacgagatcgctcacaaggatctggacgaggccctctccatcgccgagaagctgccgcgccaggaccgcatccacgagatcaaggagcacgtgcgcgaggtgctcgcggacgagttcaccgatatggacgatgccgagaaggacaaggaactcggtaacgccttcaaggagctgcagcgccagatcgtgcgtcgccgcatcctgaccgaggactaccgcatcgacggccgtggcctgcgcgacatccgcaccctgtccgccgaggtggacattgtgcctcgcgtgcacggttccgccctgttccagcgtggcgagacccagattctgggcgtcaccaccctgaacatgctcaagatggagcagcagatcgacgctctgtccggtccgcagtccaagcgctacatgcacaactacgagatgccgccgtactccactggtgagaccggtcgcgtcggctccccgaagcgccgcgaaatcggccatggtgccctcgccgagaaggctctcgtgccggtgctgccgagccgcgaagagttcccctacgccatccgccaggtctccgaggccatcggttccaacggttccacttccatgggttccgtgtgcgcctccacgctgtccctgctcgctgccggcgtgccgctgaaggctccggttgccggcatcgccatgggccttgtgtccggcgatgttgatggccagcacatcttcaagaccctcaccgatatcctgggtgctgaggatgccttcggcgacatggacttcaaggtggccggtacttccgagttcatcactgccctgcagctcgacaccaagctcgacggcatccccgccgatatcctggccgccgctctgcagcaggccaaggaagctcgcgccacgattctcgaggtcattaacgagtgcatcgacggcccggctgagatgagcgagttcgctccgcgcatcatcaccaccaccgttccggtcgagaagatcggcgaggtcatcggcccgaagggcaagatgatcaaccagattcaggaagacaccggtgctgagatcgctatcgaggatgacggtaccgtcttcatctcctccgaaggtggcgaggccgccgagaaggccaagtccatcatcgactccatcgccaacccgcatgtgcctgaggccggcgagacctacaacggcaaggtcgtcaagaccacgagcttcggtgctttcgtgaacctcactcctggcaccgacggtctgctgcacatctcccagattcgcaacctggccaacggcgagcgtatcgacgccgttgaggacgtgctgaaggaaggcgacaccgttgaggtcgtcgtgcagggcgttgacgatcgcggcaagatttccctggctatccccggtttcgaggatcaggagaacaacgccggttcccgtggtggccgtggcgatcgtgatgatcgccgtggtagccgtggccgtgatgatcgccgtggcggtggccgtggccgtcgttccgatcgtgatgaccatgacttcgaccgtgatgacgaccgtccgcgtcgccgtcgttccgacgatttcgaggatgactacgaggatcgtccgcgtcgccgtcgttccgatgaccgcgacttcgaccgtgacgaccgcgattcccgcgatgatgatcgtccgcgtcgccgtcgttccgacgatttcgaggatgactacgaggatcgtccgcgtcgccgtcgttccgatgaccgtggcgatcgtgatgaccgccgtggtggctcccgtggcggccgtggccgcggttctgaccgtaacccgcgttacgccaccgacgacaactacgacgactaccgtgccgaccgtgaagagcgctccgagcgtccgcgtcgccgcgttcgccgcgactttgatcccttcgaggactgatctcttatctggctcctctctctgaggggagctaaacaaagggcctctgtaccgattcattcggtacagaggcccttcgcataccaagcatccactctcgcatcgtgtctccgaatgggacaatgcaggaattccgccatttttctggtgttgtcccacacattgtagtttgcggaatcaaggccttaatataagaatggcattattccaacgattctttgatttgtgggatgggacaacgcgagtgtatatcgtttgatgttcgtgttgtcccacggataagtgggacaacaggggagaaatgctggaatcggcttgttgtcccacaaaacgcttaattatcggtcattctaagttcgtatggtggacgtctaagagatgacgtttgctgatagcattcatagcccgaccggtcggcatctatgcagtgccattgctacggagccaactggaacacctcgtcggactgggcggcgacctcgggactgtgcgtcacgatgattgcgcactgaagcgagcctgatagctgccggcaacttagatttcacttatctggagcttttctgagagctttctgggcgcgccggccgttcgaaagtgttgctaccagagcagtgtgccctctttgtggcagaacgttcgcgtctcaacgaggggcacgcgaagtttctgccgtttgaccgactcgaaacggcagaaacttcgcggggtattcgtcgctccgtgcgatttctgccgtttctgccacactccaaggacgtagtccaggcgaatgccgtaaaaatctcctgttttcacgcgatgtgtggaagaatggtcactgaagggcccagcaaaggagcatatatgagtgcaggtctgattatcaccattgtcgttgtcgtcgttgtcgtcgttatcgttgcgttgatcgcttgggcggtcggtgcttacaacaacctcgtcactctcaagaaccgcgtaaagaacggctgggcgcagatcgacgtgcagctcaagcagcgcgccgacctgatcccgaatctggtgaacaccgtcaaaggctatgccacccatgaatccgaggtgttcactcaggtgaccgccgcccgcgccggcgtggtggctgcggccaacgatccgaacgccaccaccgctcagcgtgccgccgccgaaaaccagctgtcccgtgcactggtcaatctgcaggccaccgccgaggcatacccgcagctgcaagccaaccagaacttcatggatctgcaagcccagctcaaggaccttgagaacaagatcgcctacgcgcgccagttctacaatgatgtggtcctgaagctcaacaccgccatcgaaaccgtgccgaccaacattatcgccggtctcttccacttcgagcaggcccagtacttcgaggcggatgacgcctcgcgccaggctcctcaagtcaagttctgatgatgtgaaggcccgctaggcaacagccaagcgggccttattgctggtcgttaggggaagactgtatgaagaagcgatttatccgtgctggtgttatcagtgcgctgattacgtttgcggtggcatgctttgccgcattgatgatggtcataatgccagctggcgattctgcggatctcagctatcgcacgcttgactatgacgtgaccgccactgcggatggcaatctcaaggtcacgcagcgtatcgatgtcaagcttcgcgatcgttctgatgatgacggagatcgcccttggaagcagctctttcagcaatattcactggctcccggcaacttgactgatattaccgatatcagtgtgcgcaacgtcactgatggcatcgattatgcccagcagaccgagcccaaactgcccagtgccgtgtcctccaacgaggcatggaacagcgattatgccaaccattggtatatcgccgacgtcagtgcgagcagtgacaatccccagccctacacgccaggcacagacggtattcaggtcggggagtcctcgaagagcgccaaaaccgtggagatcggctggaatatcccggtaaccaccgaagccaacagcatgaagttcgaagttagcttcaccatgcacaatgtggctaccaagtggcaggacgttgcctcattccaatgggaaccgttcggcaaaaagaaccaagtgcccattggcacggtcactggcactgtgcacttccctgaagacatcaccggcaaaacctcatgggcatggttgcacaccgaacgcacctccgaaaccaagcgggagtcggacggcagctacacgttcacggcctacaacatgcgtacgggcgactatctggacgtggtcgcggcctttgactccagcaaagccggggatatggcccgcacccagcccggtgaccatctcaacgacctcaaaaccagtgaatacaaccagcagcaacgttggcttgaccgtcaacggcttgccgctcgaatccggctcatcggctggattgccaccatcgtgatcggcttggcgctgtgcatatggggcgtatgggccgccatcgcaagcaatcgtcgcgcgcaataccacggcgacatcgaatactggcgtgaccagcccggtatcagcccggcttcggcggccagactcatcacgcttgtggatgcaagcgctaccggctcctcctccgaccgtgagctgacggccaccatgctttcactggccgtcaaaaaggccatcgccatctatcctggtcctgcggacatgtaccgaggcatcgatatgagccaagccactccagtgggtctgatccagatgattactgcggaccccggcaaaatgaacgcggcacgcaacaccagcaccatcgtgattctgccggccagccttgatgcggcgtccaatatcgaacaacttggtctgagccaatccgaggaagcgctgctcgctctgctgattaccatctctcagcgcgtcggctgcccggtattcgacctgaaccagatgaagaacgtctgcaaggactgggcaagcggctatctggagctcaataaattcacggattcatgcgcggctgaatactctccattgaccagtacggcgtcttcccaatgggctgttgccggtgtgctcgctgtggtgcttggcctcggagccttgatcgtcaatgggaccactggttttatggtggccggcatgatcaccggttcgccgcttctgctggtcgggctgttctgtctgttgggcggcacgtcaaccgcactgaccgaaccgggtcatgagatggcgggacggtgtctgggcctgaagcgctacatgcaggacttctcgaacttcgccgaccgtggcgctgccgacatagccatgtgggattggtatatggtgtacgccgctgcattcggcatctccgagcgcgtgatgaaggaactggccaaggcctacccgcagatcaacgacccggcatggctggatgccaatgccgcaggaacgttgttctactggaactacaggccatatggctggtacggcggccgttactacggtgattccgcaacggccgatcaaggtaacctcggtgctgcagggccggttccggcatacggtggcacatcgttcgccggtgggttctccgaccttggttcacagctgtccgcagggttcgcggacatcagctcgaccattcaggcggcagcgccttcatccgattccggtggcgatttcggtagcttcggttccggcggcggtagcggcttcggaggttcattcggcggctccggtggcggttcattcggaggccgctgatgaggcatcgcgcgatacgctccatcatcgccacgttgatcgccgccgcgaccatcacggcgatactcatcgtgacactgctcatcttcaattggtttaccgccgatcacccgaaactgtcgtaccgcagcctcgactatgaggtggccgtgcagcccaacggcgacctcaaggtcacccagcacatcgacatgaagctggacagtcgaggcaagaacaagccgtggaagcagctgtattagacctacgaaatcaacgaatacaatctttcggacatcaccgacatctccgtcaccaatacgaccactggcgaaacgtacacgcagcttaagggagatccgctgcagccggccgatgtgaatggcgacgaagcgtggaacagccactacgccaaacactggtatgtggtggccacgaaccggatcgacactgaagcctacgcctaccaacccggcaaggatggcattccgatctaccagacctgggatgagtaccaggattacgatcagggtatttccggtcgaaagattcagcttctggaaatcggttggaacattccggccaccgccaaagccaaaagcctgaaatttgaggtgacgatgaccctggtgggcgccaccatgctctacagcgatgtggccaagttccagtgggagccggtcagcgagctcaacgaaacgtccatcggcaaagtgactggcaccgtgcgattccccaacggcatcacggctagcaactcctgggcttggctgcactattcgggcgtttcaaccaccgaacgaggtgaaaacggcgagctgaagttcgcggcgaacaacgtgcgcgtgggccgctaccttgatctggtcgccgccttcgattcgtctgcaatgcacgacacctccggaggcaaggccggccaacaatatacgccggcaggcgactggattcgcaagcgggattatgacagtctagccgagctcaagcagtccgaaaaagataaggaagcacaggcgcgcgcgagcaacgtaacacagtaaagaagtgggccatcacgcttggtataggtttgggaatcagcctaatcgcactgattatggcgatcttcggattcgtgcgtgtgcgccttgcggtcagaagccgggatgccatgtacgttcacgacattccgcagatcgggccggtgaacgtggcgcgtattgtctcgattatgggactggcaccaaaacatggctacgatcatcgccagaccgccgccaccctgctctcgctggcagccaagggcgcaatcgccatatatcccgggccggcgagcctgtacgggggcgtcgagctgactgggcttgcggccaagacgcggccgttggctttgcgggcggtgagtcagatgctgagtgggagcggggctgcggatttggcgctctgggaccagtatcttgtctatgccacggcgatgggcatgtccaaacgaacgctgcgggaacttgccaaagcatatccgcagattcagaaccctgactggttggacgataatgccacagattcgttggtgtattggaacttccggtacgcctcgatcggcgatacccatgatggctcgtcgcgtgcgagcaccggcgatggcactggccttggtttcggtcttggcccggcagactccgaccacttgggtgccagcttcggcggcatcctcgatttcggcgcgcaaccaggctccggattcaacgaaatcagcgccacgatccgaggcgcagccccagcatcggcatccatcgacggatccagcggcagcttctcaggcggtggctccggcggaggctcgttcggcggacggtaatgggggagtacttaagcaattaaaaagcccggtgtcgtaggacatcgggcttttcacctataactgaggttaaggaaaacctcggcagtcaggtccaacggggcgaaagtctgtggcgccgcctagaagattgccccgaagttgacgcgacctttctgctagcaaacatcataccagtatccatcgaaccttccccgtacactgagtggaccacatcaaggggctattgacgtggtgccttggtgcggtgtcattgcgccagccggtgtaatggctacctataactcaataaggaggttctcatgggaggaaacgaccgtgacaaccgtccgagatctgaccggcaataccgggaaggcctgatgacgggcctgttgatcgccttggccaaccaagttggacagggatggtcgacggccattatcatcgccacactggtactgcttggtctgagtctcaggcgaggccgctgattcgtcagcggaacagccggaacctttgacgggttccggcccctcgtcttcacttaagccttgtggagtgaaatccagcggaatgcctacgctgggatatggatagacagctggctgcactcgctgcagccacccaccaatgaagggaattgccatgacattgttccgtcagctcggaccgttctccaccaccgccatcggtcacggcgaaatgccgctgaccatcgaaaacaaccgcggccacgaggtcggcatcgaaaccctgcacgcttcgctggatgccggatgccgccatatcgacaccgcatgggcctattactgctccggtggcgaggagcagaccggcgagaagctggtgcgcgaggcccttgaaacgtggaagggtccgaaggatgaggtgttggtggccaccaaggtgggtcacttccgcaacttcaccgacgaccgccccacgtgggatgtggatggccgtccggagaatctgattcgccgtggcaaggagagcgcactggcgctcggtgtcgacaccatcgacctgctgtacttccaccgtccggatccgaaggtgccgtacagcgagtctgttgaggccatcaagcagctggtggacgagggcgtggcccgcgaagctggtatctccaacgcttccatcgagcagatcgacatcgcacgtggcattcttggcgacgacctcgtggctgtgcagaaccagtactcgccgattcacctggacactcaggacacacttgactactgtgccaaggtcggtctggcattcgtgtgctggagcccgctcggcggctaccgtcacccctatgacgagaccaagttcgatccgttccgcgaggtcgccgcggctcacggcgtgagctaccagcaggtcgtgctggcgtgggagcttgccaagggtgatcacgtgttcgtgattcccggcgcccaccaccccgagaccatcctcgactccctcaaggctgaccagctcgagctcacccccgaagagctcgccaagctcggctgagtgttccggtttctttgagaatttgggccactgactcattagtagcgtcagaaattcaggaaatcatccccattctcctaaaatcctgacgctgacggtgcctgagcgtcaggattttaggaaaacacccttactttcctaaaaatctgacactgagaagatcgtagcgtcaggattttaggagattaccttttatttcctgaatttttgacgcaagagtgtcgacaacagcaatttcggaagagcgattcattgcgaaggagtagtatgcgcaagaaacttatcctcgaccttgacaccggcattgatgacgcgctcgccatcgcctatgcactgggcagtgccgacgaaatcgatctcatcggcatcactgccacgtatggcaacgtcgccgtgcctctggccgcgcgcaatgcgcttgcggtgctccacgcatttggacgcgatgacataccggtgtatcccggcatcgaccatcccatcgcacccgcgaagttgccattgatgcgcggcaccacgccggatgaacgtgccgaagcataccgtcgttggcaggagggcggtgaggacggatggcagaccgatactccatgggcacccagccccggttcggttgcggttcatcacgccaacggcattggtggcgcagtgttgccggattctcccaggcagcccgaggcgccgggctccgcagtagatttcatcatcgccgccgcacgcgaatgcggtccggatctgaccatcgtgcccaccggcgcaatgaccaccatggccaccgtgttccgtaatgccccggatctgaaggattccggcatcaacgttacgttgatgggcggttcgctgacgctgccgggcaatgtaagtcccgctgccgaagcgaacatctcccaggaccccgaggccgctgattacctgttcaagtgcggtgcccgcaccacgatggttggtctcgacgtgactcatcagaccgcgctcacccgcgagaaagctcatgaatgggccgctctgggaacgccggccggtgacttccttgtcaccatgaccgattactacatcgatttctacgtaaagaaccagccggaaatccacggctgcggactgcatgacccgctcgctgtggctgccgcgcttgatccatcattggtcaccacgttcggcttcaacctacaggtcgatttggagggcccgttccgtggccgcaccattggtggccgttctcgagtgcaagacccggacaagcacacgcaagtggcgctcggggtcaacgtgccggcattccttgaccgcttcatgcaacgtgtcaccgccgtggcacgcgggtgacggactgatacataactgaggggccttctgatcgattcatcagaaggcccctcaacatttggtggtagataagagttacagtccaggaattaaaccgccgggcgggtcaagcgtcagatactgctcgtccaaatcgatttcgggcaccagcgcttccacgaacggaaccagcgcggttttctcgatgacgtcctcacccttggaattctgaccggtcaccaccggctcgaccagacgaatcttcagcagcgactgggcgggggagtcgaccacgtcgaccaccttgcctaccacttgaccagcgggcaaccctaggccattgccctcggacagacgagcctcgaggccgatgagatccttgggataccattcgtccgcctcgagcatctcttccgcatcgtcggcctcgccatacagctcgacgccgttcagtgcctcggcggcggtacgatcatccgtgccctcaagtttgagaatccatcgatctttgaatgtgcgcgaattctcaacgatatactcggtttcgccatcctggctgtagagcacggaatccggctcgaagcgccattcgggatcgtcggtgtacaagcgcacggtgacttcgcccttgagcccctgtgcgcggccaatacgagcaaccctcagcaactcgagctgctgagggtcgtcgtgcatgtcttgctctgccatgctgtgaatcaatccttatcggttatcgacggacgtccatgatgtcgacgcgaaccttgtggtcggacaatgcctgcaccacggtgcgaatcgcattggcggtgcggccgctgcggccgatcacgcggccgatgtcctccgggttcacgcgcacgcgaagcagttcgccgcgcgcattctcatgggacttgacggacacatcgtcgggaaaatcaacgatgttcttgatgaggtgttccacagcctgtgcaagcatgattgctagcctttcgtttcagctcaggcctcggccggagcttcctcagcagcctcagccggagcttcctcagccggggtctcctcggcggcggcagcagcttcggcctcagccttagccttggcgtcagcctcggacttggcggccttcagcttctgagcctggttctcgacggccgcaatgcgggcctcggcatccgggccggcttcaacggtcttcagggtgccttcagcaccgtcaaggcccttgaacttctgccagtcaccagtgatgttgagcagcttgaatacgggctcggacggctgagcgccgacgccaagccagtactgggcgcggtcagacttgatctggatggtcgagggctgggtgttggggttgtaggtaccgatctcctcgatgaccttgccgtcacgcttcttgcgagaatcgacgaccaccacgcggtagaaggcgtagaacttcttgccctgtcgcttcagacgaatcttggttgccaaaatggctctccttgtaataactaggtttgtggtttcgcggctaccatgtggggcatggcccaccggaatccacgtgtcctcgcggcccggggtgtagagggcgccacgcgcgcgcgaataactggcctattatagcgcgcagggcaggactgacgtggtgagtgtcgtgtgcggtttaccgtggcagcggatcgcggggatgcgatgtacggcaggcagctaacgaagcgccagcgtggcgacaagtgccagatgatcggtgtccttgatttcgaacgacttgacctgtgatggccgcactccgggggtaaacagcacgtgatccagctcgatgcgtggccacttgagccagcgggggaacgtaaggttggggccggccgcctgggtcaggctcgcgtccttgaagccagacttgagcagggcacggaaactggggtggtcggtgcttgagttgaggtcgcccatcacaacagcgatgttgtgatgggcgatggaccgagctttggtgatctctcgtaatcctaggattccggccgaccagtcggcacagccgcgcataggggatttcggatgagccgagcagaaagtgatggttcggtcggggtgcgcttgggttgtggtgcttgggttggcagcgatacggatagcgttgccattggtggaggtgctggcgggcggcatcttggcttgatctgcgatgcgcagtgtgatggccggcacgtcggcagcggggatgctgaccacgttgggcacggatgcgcccggctcgtatgcggagtagagcacgttgaagccgccgttgtcagtgtccttggcttcgccgaattgatgataggggagcatctcgttgagacctgcctcggtgaggcgtgcgatgagctcgtcggtgacctcctgcaatgccagcacgctgatgccgcgtttgcgaatattggcgatgatgtcattggcgtccgcgcgaccgtaacggcagttcagggtcatgacggtgaactgagtggggagcgtggtgcgggtggattccgaggccgtggaagatggattactggctgcgtctagtgcttcacggcttgtgctggcagtaccggaagatgatgcagcagcagagggtccggcgttggggtcgcttatattatgggtgtttacagatgtttcacgggatgtttcacgatttgcgtcgatagtgctggacgataccgtgacggtggtgtcggcgttgctggaattgttcatattctgcgtattcgcagatgtttcacgcggtgtttcacggtgggattccttacgcttgccggcggggtcgattgacgtaccccaatagttaagccggtgcgagctggcgaacagtgcggccacgataagcagcgacataacgctccattcgcgctgccacgcggcgaatgcggccaaaaccaccaaaggaacccacaacaatggcgtgagcgcaatcatgtatggcaacggcatgcgggcttcaagaccggccggcagtgcgctcaacgccgtccacagcagtgcgatgatcgccacagtgccaaagattgtcgtcattggagttcctttccgaatatgtcgaaaaatatgctcccgccagcgggagcccctcgacaatcagcgaccgaacaagccgctcaaaccgccgccgaggttcggaggcagctcagtgccgccatcgacgctgcccatcatctcttcaaggcctgcaggcagagctggattctgcggcttcttggcgaacgcggagccgccggtggaaccggaggacttcttgccggccagcttgtcgcgcaatgccttctcctcagcctcgcgcttcatcgggttgccggacttgccacccttcttcttgttcttgcccttcttcttaccgccgcccatcgcagggccgccgaagccgggtatgccgccacccatgccgccgcggttggacatgcgcttcatcatctttgcggcctgctcaaagcgctgcagcagagcgttgacctgcgagacggtcacgccggaaccataggcgatgcgggcgcggcgagaaccgttgatgatcgacggatcacggcgctctgccggggtcatcgagcgaataatcgcctcggtgcggtcgatctccttctcatcgaactgctcaagctccttgcggtgctgggccatgcctggaatcatgccgagcagcgacttcatcgaaccgagcttgcgcacctgctgcagctgatcgaggaaatcatccaggccaaaggagccctcggagatcttctcggcggccttgcgggcctcttcctcatcgaactgcttctgcgcctgctcgatgagcgtcatgatgtcgcccatgtcgaggatgcgcgaggccatgcggtccgggtggaagacctcgaaatccttcaggccctcaccgttggaggcgaacaggatcggcttgccggtcacggacgccacggacaacgcggcaccaccgcgggcgtcgccatcgagcttggagagcaccacgccggtgaagtccacgccttcatcgaatgccttggcggtcttgaccgcgtcctgaccgatcatcgcgtcgatgacgaacaggatttcattgggctgcacggcgtcacggatatcgcgtgcctgcttcatcagctcctcgtccacgcccaagcgaccggcggtatcgatgatcaccgtgtcataaagcttctgcctggcgagttcgatggaatcgcgtgccaccttcaccgggtcgccggaagtctggcccggagcggccacagcctcgccgccgtcggactgcacgcccttctcgggggcgtagacgggtacgccggcacgctcgccgatcacctgcaactgggtcactgcgttcggacgctgcaaatcggccgccaccagcagcggcgtatggccggaatccttgagccaatagccgagcttgccggccagcgtggttttaccggcaccctgaagacctgcgagcatgatgatcgtcggcgggttcttggcgaagttcagagggcggtccacgccctgaccgagcacgtcggtgagctcctcattgacgatcttcaccacctgctgggcggggttgagcgcgtcggagacctcggtgcccagtgcgcgctcgcgcaccttgccagtgaaggaacgcaccacgtcgagcgccacgtcggcgtcgagcagcgcgcggcggatttcgcggatcgtgccgtcgatatccgcttcggaaagcttgcccttgctcttcagatgcttgaacgcattcgagagcctatctgtcaaagaactaaatgctgccataatgggcaacagtctagccgccacgcgggaaattctatttgccaggcaacgattctgccgcccatattggcgttgtgttgcgatggtgccgttcggttgccggcgttggcggaatcgtcaccagacatctagccggcgagtgtcctatcatccgctcgtggcgaagccaatcgagtgcttccgttaccatagaaaatataaagaatcctgtgttttttggaatgcttacgctgttttgaaaatccctggacaccgcttatacgcagactgccgtgcgccctcgcgaacttaggtcaacaaccagacccgttgcgggccaacgcagacatgccgtgcaataaggaaggcccaccgatgcccacccaaaaactccttgaacgcaaagctctgatcgttggcatagtcgtcaacgttcttcaggtgctcgccggaatggctgtgttcttcatgactggccttaaggccatgttccttgatttctccttcaccgcaatctccgtcctttccggactggtggcggtgtacctttcgacgcgcacggtgcgtaccactgagcgcttccccaatggcctgttcgcgttggagcctatctacgcgatctgcaaggccatcttcaccatgtcgttgttggtgtattcgctgatcgacgtgtgccgagtggcttatgactacttcgtatttgggtccggcgaacgcatcgaaaccggcccggtggtcatttacgagatcctgaccgtgatcgtctgcttcagcctgtacatgtactatcggcgctcgaaccgtgccatcggcaactccagcaccatgctcaccgccgaatgcaaaagcacgctggtcgacggctcgatgtctttcggcattggtgtggtcgccgtattcctgatgctgctgccggctggcggaccgcttgacttcctgcattacaccggcgatttcttcatcaccgtggcgttggtggtgttgaccatccgcgaaccgttcagcgtgctgaaggaggcgttcgtggaattggtcggtggcgtgcatgacgacgacgagacaaatgcctacgtggaagccgaggcgcagcggcacctgcctgccaataccgagtacgagcagacgctgattttcaaaaccggcatgaactacacggtggacgtgtatttggccggcactggcgagaccatcgatgtgtctgatctcatcgaacgcaagcgctcgttggaaaaggaactcaccaagcgcctgcacctcgtggacgtagacttcgttttcgactgattggctggtttgatggggctttcgccatttcgaggggctgatttcgtctttcccggaggtctacttccgtttcaaggggctgcctaaacttcaaactgaaagtacaaatggcttaacgacaccgtcgttaagccatttgtagtgtgcctctacttgagcgtcagccccttgaaacggaagtagacctccggaatcggacaaatcagccccttgaaccgggaatatcgttgttcgatgtcgctaagtggctacttcaggctccaggtcgagccttgcaggccgtcttcgatggtgatgccggcctcggccagcgtatcgcgaatctgatcggccttggcaaagtccctagccttgcgggcttcggcacgggcattgagctgttcggtaataagcgcttccaatgcggcgtgctcgggggtctcggtcgtgccatcgctggcaccaccggcagctccggcagagacccacggttcggccagcggatccagtcccaacgtgtcgagcattgcgcgcacggcgagcagcgtctcacgcacttcggcctgcgcggcctcggaatcggcgcgatcggcaagctgcgagagcagcgtattgccggaacgaatggtggtgaaaatcgcggcggtcgcgccggagacgttgacatcgtcgttcatcgcggccgcgaaatcggtgggcaggtcatcggcggatatgccggtaacctcttcgcgggacggctgaccacccaaggccacgccggcacgctcgatgaagttcgagacgcggtcgtatgcggcctgagcctcaaccagtgcctgatcggaccattcgagcatcgaacgatattgcacggaacccagcgcgtaacgcaccacccaagcggagttctcagccagcacagacggcacggacaggccagtgccgagagacttcgacatcttctcgcccttggcggtcacccaagccgagtgcatccagcgtgcggcggacgggtagccagccgcacgggtctgggccatctcgttctcatggtgcgggaagcgcaggtccaagccgccgccgtgaatgtcgaatccgtcgcccagataacgatgggacatggcagagcattcgatatgccagcctggacgtcccacgccgaacggggttgaccagcgagcgtcctcggggtcggtatccttcggagctttccacagtgcaaagtcgcgcggatcatgcttgtcgggggaggcatcggccggatcgacggggttgtatttgtcgtcgccggtggcatccacggacgggcccatgcggtcggccacggcagctgcttcatcgacctcggcggtctgcttctggtgggtcagctcgccgtaatgcggccaggaggccacgtcgaagtacacgttgccggtgggcttgccatccgcatccgtgaccacatagccatggccgttgtcgagaatgcgctgaatcagatcgatcatgtccgacatatggccggtggcgcggggctccacggtgggcggcagcacgccaagcgtgttgtacgcctcggtgaattcgcgctcatagtagtaggcgcgggcccaccagcgctgaccggcggttgcggccttgtcgagaatcttgtcgtcgatgtcggtcacattgcgcacgaacgtgaccttgtatccgagcttcaagaaccagcggcgcacgatgtcgaacgctacggcggcacggatatggccgatatgcggggaagactgcacggtggcgccacacacgtagatgccgacctcgcccggcctgagcggcacgaaatgactgacctgatgcgatgcggtgtcatacagattcaggccgtcggcggccttggctacatgcaccggcgtcaggctcgacggcataacggaagtgttgaaatcctgcggttcttggctgtttcccatagcccctaagcgtagggtttgagccagacatgagacgtggcctattggtgcatttttgcgaggcggctgttcatgggttcggtgccgatcgacgacatggcttgttgctggcaacgattcaagtgcggaacggggcatcaaacggcggcgaaccattcgaaaatggcggtgttaacgcaaacggggaacgctcgtgtcacaataggagccatgtccacaccacaagtgctgattttgcaacatgtcccgtgggagcgccccgggcgtattctgtcgaccctcgaagatattgggctcgatacggtgattatgaatattgccgacacgaagaagcccgatcttcccgacttcggtgaccttgccggtgtggtgattatgggcgggccgatgggcgcgctcgactatgacaagtatccgggattaaaggccgagggcaagctggccaaagcggccgtggccgtaggcaagccggtacttggcgtgtgcttgggccaccagattatcgccactgcactcggtggccagctgcgtaagggcgatgcgccggagattggctttgggcccatcaagcgcgtggataggcacgacttcttctccatgtgggataagcagctgaacgtgctgcattggcataacgatgtagtcggtctacctgagggcgcccagctgctggcgcgctcctccatcaccaaggtgcaggcgttccgtctgggttccgcattgggtatgcagttccatctcgaagtgtgcggatccctgctggatgaatggcttgatgagccgagcatggtcaaggatctcaaggccgccggtggttccaaatcccagttgcgcgagcaattcgcccagtacgatcaaatgctgcagccgctcgccgagcaggtgttttccggcttcgccgcccgctgcaactcctactcccagacgctgagcaagtaggcggatgacaatgtgatcgccgcatctcgttgtgcgacaattatcttctcccaccgcgtagtgaattccccaccacgtggtgactcaaaatggcggtattccgcgaaaagcaaatcttcgctaacatcgtcgtggggatttcaccgtgtggtgggtggtcgacatcgtggtggagacctcatcactgggcaagcatggcgctacattggtgagtcatgccgacttatgacattggattggaacacgtttcgctcgccttcgccaccaaaaccatcttcaccgatgtgacccaaggtgtattcgagggcgaccgtatcggcattgtcggtaagaacggcgacggcaaatccacgttgcttcacctgttccgcggcacccaggagccggactccggccgcgtgacgaagcgcggtggactcaccttcggcatgctcgaccaacgagatccacttgacgacaacgccaccatccgcgaagccgcattggaaggccgcgcggactacgaatgggcgtccgacaacacctcgcgcgagatcgtggaagccctgctcggcggcatgagcctggacgccaaggtcggatccttgtccggcggccaacgtcgccgcgccgatctggctcgactgctgcttaaggactgggatattctcgcgctcgacgagcccaccaaccatcttgatgtggtcaccatccactggttggccgagcacctgaagaaccgttggtccaaaggtcagggcgtattgctgctcgtcacccacgaccgttggttcttggacgaagtgtgcgaatccatgtgggaggttcacgacggcgtgattgagccgttcgaaggcggatattcggcatacatgctgcagcgcgtcgagcgcgatcgtcaggccgacgtgcgcgagacgaaacgccgcaatctggcacgcaaggagcttgcatggctgtcccgcggcgctcgcgctcgctccaccaagcagaagttccacgtcaaagccgcccgtgagctcatcgccgatgtgccgccgatgcgcaacacggttgagctcaagcaaatggccacctcccgccttggcaagcaggtggtcgacctcatcaacgtcacacagatttttgaacacacgcagggcatgaccgagatagacccggacgtggcggcgctcgccgactcggcctcgcgcgtggatgtggtgaacgccatgtatgccgaaccgcagctgcacggttccgtcgaggtggccgtcaccgatatggacgatccccgattggttgatgcgggtgtgcccgaagccatcgaggccgcggccaaggcgcgtgaagcggaggccaatgcgccgagcgacatcgagcgtgaggttcgccgccagaacaccggtggcgagaccatcggcagcgatgcccttgacgaggaagccgcgacgttcgccgcacgcaaagtcaccgtgtccggccgtgagatcctcgatgacgtgacatggctgatcggtccgggcgaccgtttcggcatcgtcggcgctaatggtgccggcaagtccacgctgctcaagctcatcgacggcacgcttaccccgaccgtgggccacgtgaacatcggcaagaccgtgaaattcgccgtactttcgcagcgcttggacgagctggagaagctgggccagtacaagattaaggaagtgctgagccgctataagcccagctacatcgtggagggtaaagaagtcactccgggccagcttatggagcggcttggctttgagtccgcacagctgatgacgccgattcgtgacctgtccggcggccaaaagcgccgcatgcaattgctgctgattctgctggatgagccgaatgtgctcatcatggacgagcccggcaacgatttggatactgacatgctcgctgtaatggaagacctactcgacacctggccgggtaccctgattgtggtttcccacgaccgttacctgcttgagcgcgtcactgaccagcagttcgcattgatcggcggcaaggtgcgccatctgcctgggggtgtgcaggattaccttgacatggttgaggacctcaagaacggcaaggggcttccggaggataggggcggctttgctgggactggtgggtcatcggccaagcgtggggcacagggtaagggttctgcggctgagtctctccctcagtcgacttcttcggagggagctcaagattcggccgagccaaagctgagcggcaaggcattccatgaggcatccaagcgtgtgaacgccatcgagcgcaaacttgccaagctggaagagcagaaatccgacctcgaggcgcagatggccagccatgacccgagcgactacgaaggcctcaacaagctcaacgaacagctcaccgcagtcaacagcgaaagtgatgacctcgaagccgaatggctcgagctctccgaacagttggagtagccggggaacgcagtgtggtctgctgcgaagcgtgatttgctgtggggctctccctcagttacctccggtgacagctcccctcagagaggggagccaaagtgcataccgaaccgccctccgttgattctatgagctgtccgttagcctttgtattcccaaggattgatgagttccacgccggtgccttcgaagtccttggtgttacgtgtggccacacttgctccccaagagcgggcaattgccgcaatcatggcattttggatacttgtaggtttgcccctgcgctcgcgttcaatgaagatggttgcataattggcagctgcttgggtgtcgaatgcgaatgttctatctgctaaggtcataagctcaagcttgatggttgtgtccgtgtactttcgtcgtttgccctcaggcatttgacatattccggccaacaactcggcgacggcgatggcagtggtcgccaaattgcttgtatcttggtttctcagccaattggcaacgtgctcgtctggctgtttcttaatgatttcgctgatgacgttggtgtccaaaataatcatggttacgacctattcaaaggtcactggtggtcgggaatcatcaggatttcgttcaggcgctggaatctctccttcttcgagcccatcaaaatctattttttccatgaattcacggatctcgtcataaaaattggtctttcgtgtcatttcgtgtgccaccgtgccggccaaccattcttcaagaatggaccgcacctgagattccatggagcgattgttcttttcggccacttccttgagctgttgaatttgttcatcgggtatttttcggatggtcagtgttgccataatgtacctccttgttgctgtcataatgctagcaaatagtgctgtcattatgcatgcagatggggttgcgaggcgcgcatacaaaaagggcggatatgcgttgtacatatccgccctttgggtttggtcttgcaagctcccctcggacggagggaagccagagaaaatcagcgaccggtgacttcggagccgacgaccttttcgcttaaggcgtgcgggccacgggttacggcgactgctccggaacgaaccagctcgatgacgccgtaatgctccagaagccccagcagagcgtcgatcttgccttcagcgccagtcgcctcgatggtcagcgattccgggttcacatccactacgcgcacgcggaacaggcgcacaatctccagtacgtcggaacggttggactgatcggcggccaccttgatcagcaccagctcgcgctccacggtggaattcgggtcaagttccacaatcttcagcacgtgcagcagcttgttgagctgcttgatgatctgctcgagcggcacggcctccacgtcggcggtcaccgtgacacgggagatgtccgggcgctcggtgggggagacggacagagagttgatgttgaacgcgcggcgggcgaacaagccggcgatgcgggccagcacacctgggcggttctccaccagaacagagagtgtatgacgctcggaaccgggacgagatgcaggatagttagtagccatgatgattctcctctcctcagtgctcgttcgcggcggtcgtggtctcgtgctcgaacacgccagtcgcatgttcgtccgggccggtgcctggagccggggtcccgccggtcagcggtttgataccgggcttgtagatcacctcatcgtttgaggcgcctgcggcaaccatcggccacaccatggcgtccttccatacgcggaaatcaatgagcaccggacggtcgttgatctggttcgccttctcgatggcggcaatcgcctcatcttcagtgaacgcgcggatgccgacacaaccataggcttcggccagcttgatgaagtcaggcacctcgatcggaaccgaatcatcggccagttgcccggcaccatcggtaccgtgagcctcgccatccaacaggttggtctgcgagtagtggtgctcgtagaacagggtctgccactggcgaaccatgccgtacacggagttgttgaggattgcgatctttaccggagcgtggtccaagaatgcggccgccagctcttcggacgtcatctggaaggagccgtcgccatcaatcagccacaccggcttcttgccttcaaatttacgggcggaacccacggatgcgccgatggctgccggcaggccgtagcccatcgtgcccaagccaccggaggaaatccaggagtgctggttctcgaagtcaatgaactgcgaagcccacatctggtgctggcccacgccggtcacccagatggtggaggagtcggccagctcggagagcttcttgatgacccactgcggggccagcgagccgtcggtcggcttgtcccacgtcatcgggtattccttgcgccagccatcaattgccttccaccagggagccaggtttggcttgccttgaatggcttgcgtgcgctcgatttcaggaatcagatcgtccagcacggcggccacatcgcccacaatcggcacatcgggctgacgattcttgccgatttccgccggatcgatatcgatgtggattacgcgggcggtgggggcgaaagcatccagcttgccggtcacgcgatcatcgaaacgggcgccaatagccacgagcagatcggcgcgctgcaccgcaccggtggcggcgatggtgccatgcatgcccagcatgccgaggttcttcgggtcggtgtccgggatgatgccgcgcgcgggcagggtggtgaccacgggggcgccggtcagatcggccagagccttgacctgagcgccggcgttggcacgggccgcgccgccgcccacgtacagcaccgggcggtaggactgggagaacagcttggcggcatcggatagtacgcggccgtgcgccttggtggtgggattgtagccgggcagaatcatgcgctgcggccatgaataatacatatcaccggtttgtgcggtcttggtcagatccacgaccaccgggccggggcgaccggtgctggcgatgtggtacgcctcggagagcacgcgaggaatatcctgtgcgcgggtcaccaggaaggaatgcttggacaccgggtaggtgatgcccacgatgtccgcctcctggaaggcgtcggtaccgatggcctgaacgcccacctggccggtgataaccaccattggcacggaatccatgttcgcgtcggcgatggcggtgaccacgttcgtggcacccgggccggaggtcaccaggcacacgcccaccttgccagtggccagcgcatagccctcggcggcatggccggcggcctgctcgtggcgcatgagcacgaaacggaacttcgtgctgttgttgatctgatggtagacgggcaggatcgcgccgccggggataccgaagacgtcctcgacgccgagatcctccagcgaacgcaccagcgcctgggcgccggtcatcttctctccatcgataatggtctgctggtcagtggccgcgtgggttttcggcacaccactgaatgcctgcaaaggcgtgggtaaagccatgattcctctcacctcgtaaatcaactgcgagcgtcagttggccgtagggtggaagccagacgctcacgtatgttccagccgcgtgtgccggtgcttgtggctccgacgcggctcgtcgctcgtgttggtatcagtctattcgtaaatctgacagccggcttacttagtccgcgtcttgagagcgtccagtgctttccatccggcttcggccgcggcaagctgtgctttgcgcttgctggagcccttgccggtgccgatgatttcgggattatcgcccaaagtgactttggcagtgaaaatctgtgcgtattcggggccggacacttccatgtggtacaccggctcggccttgcccagatgatgtgccttgacggtcagcgaggttttccagtcgagcgccgggccttcggtggccacttccgccaaggtgtcgtcaatgagccgatgaatgaccttgcgggcctcatcaataccgtgttccaggaaggtggcgccgataagcgattcgacgatgtcgcacagaatcgagttcttttcggcaccgccctgctcggcctcaccgtggcccagcaaaatgtaggggcccactttgagcttggttttggcgatggcgctcagcgcgtcctccgagacggctttggcgcgcatcttggccagctgcccctcgttcatgtccgggtgaatggtgaacagcgtttcggtggtgaccagctccagcacggcatctcccaggaactcgagacgttcgtagttggacacgccggggtgctcatgcgagaaggagcgatgggtcaacgcttgcaccagcaggtctgggctgatagtggtgcccaatgcctccagcagttcgttggccggagcttggcggtcagccgtttcttgctgtgtggtcttctcgctcatatgttcttcatccttcgcgcgatgtgctgtgtgtattgaggtctacgtataggtgcaagcaccggtatgtggcgtcttgtgtttgcggtgcgtgggcaatcgagtgatatgcgaaagccccgccacccgtcgatggcagggctttctatatcaagccgttatcgcaggactcacttggtgtgagccggctggatggcggagcggtaggtgcggccgcggaaggaaccgcagctcgggcaggccatgtgcggcagagccggagcgccacagttcgggcagctcacggttgcggtagcggtggccttccagttcgcgcgacgcgagtgcgtgttagcgcgcgaggtcttgtacttaggcagtgccatttgagtatcctctatttcgttcgaacgattgagcttaagcgtccgttatcttaacgcatggctcgtacaaaactcaagtttcgtgtgccttactcgccctgctcggcctcaagctgggccttgagacccgccaaaccggcgaaacgaatatcttccatttcgtggtgatgatcggggttctcgttcagatcgatgccgcactgcgagcacaggcctttgcaatccggcttgcacagtggctgcaacggcagggattcgaccaacgtgtctcgaatcatcgcctcgatatccgcaaaagcgccgttttccagcagcggatacgtatcctctgattcgtcttcaccagcgatgatgtcgacttcctcacctttgccgtttttgctgccgctcttgccgcagcctttgtccgctgcggattcgtacgggaagaatacggtgacattcaccggccagtcctcatcaatgggctttaaacagcgggtgcattcgctgacgaatggtgcgaccagtcggccggtaaaaatcagtccatccacgatggagtcgaatgagccggtaacgtgaaccgggtcaccctccttgatgccgacgatgtcgtcgccgataccgctcggggcggggaagtcggcgtcgatctccttggattgtccggctcgtgaagcgatttgagccaccgggattgcccacagagaatcctcgactcgtgccatagttctgcctttcgtcttttgctgcggcacagccgtgtgaggcgtatcgggtgttgtcttcgtcccatgcgccgctatgccgcattcgtgaatgctgcagtgagtgtgctgctggttactgagcttcggggtagtcgtccagcgtcagcttgggcaactgctctccggccgagcgctgacgctcttccagcacgttcaaacctgcttgtacatcttgggtgagcttgccaagctgctgggacagaccctccataaccgtggtgcaatactggtcagcgccttgggtcaggtggtcggacttggcctgggcttgctcaagaatcgtgcgggccttctgacgggccaactcagtgacgttttcctgtcctgccaggaattgagcctgttcgttggcttccctgaccatatccgcggcgcggctctgggcggatgcgacgacggcgttggcctgtgtctgtgcggattccaggcggcgttcggcttcgcgcatcagtgcggaggcgcgttccagttgcaccggcaacagctttttcaattcagcaagctggctggtgaactcgtcgcgatccactttgaccgtgccgggcgagaacatgctggttttggcctcatcgagcatggattcaagctgatcgatgacgtcatacaccgtggtgaattctgcgcggctcttgttttcctccgagtcgtcttgcagggtttcacgcagatcgggcagggcgtccatgttgaatgcggctgctttggtcggggccggtgcgggagccggcgcctctggggtcggtaccgtatcggttgcctcggtaggcggcaaatcgaccggtgcctcttcaacgggggcggccgggaccggatccggggtggtcaagtcgacgtaaccagtgggatgttcatcactcatagttatcagtcctttgcttctcgttcctgtgccaaagcatcgctgagcatggggacgacgcaatcgggcaccatgccggtcacgtcgcctccgtggcgagccacgtctttgacaatggaactggaaatatgttcaagaatcggatcggcgggcagaaacagggtctcaatgccggcgagcttgcgattgaccaacgccatgcccagttcggcctcgtaatcgccgttctgacgcagtcctttgacgatgacggtggcgccgaccttctggcagtagtcggtgatcaggccatcggtggaggagacgacgacgttggtgcagccggctttctccagcgcgcggcgaattacctcgactcgcgtgctttcggaaaacatcggtgttttcgcggcattgacggccaccaccacgtgtacctcgtcaaagaatcgtgccgagcgctcgattacatccaagtgtccggcggtgacggggtcatacgagccggggcatactgcgatagtcatgccttatagcctaccgcgaatggtgtgcaatggtgcgcttcgtgcggccacatgttacatgcggagggtttcgcggtttgcgatgggaatctatgatgggatgcagttgaatcgtacagtacgaggaaagaagtgcacgatgacttttgctgatctgttctccaatgacgccgaaccgctgcgcaaccccgaccagggtgccggaacctccgtgctggaacgtccggagaccaaggagtcgccggtgcgcgacgatggcggcgacgccgaccgctttgcacactatgtgtccaaggaccgtatcgcggaatcccgcgcgaccggccgtccggtggtggccctgtgcggcaaggtctgggtgcccaagcacgatccgtccaaataccccgtctgccctgactgcaagcgcatctacgaggaaatgacgcgctgagctgctgcgggttattgcttggctcccctctctgaggggagccgtcgtcgtagacgactgaggggagtagcgggcgcgggcccactagatttcccgaatatgtgacactgaggttgcgctagtgttacatattcacaagcgggaaaatgatggtttgtgtttcagctgtcgtatatggatatgtccattatatggattttcgctgtcggaatcacgatgtgaccaaaggattcgctattttctgcggtttttgatcaccgatgatcagccgttataagtactctcttcatactttcgtaacacgttagccacggggggggggtagcaatagcgccatatttgttgtcttctcgaaaaggagtggcatatggcgtcttcacaaacgcaagttgccggcaatgaggattccgcaagcaagatatcccagacacagaatgagcccattcaggacagcgactacaccctgtctcgtgttccggccgaggccaagcagccgttctggaggattctggtaatccgtatcggcagcatatgctgcgtctctcagctggtgctcggtgcatccctcggctacggcatgagtttctggggcgcgttctgggcgacaatgctcggatcagtgctattgcaggtgattagctgggcgctgggtactgcggcggcgcgtgaaggcctgtccaccagtctgctgtcccgttggaccggattcggcaaaatgggttccgccatcttcggcggcgtgatggccatttccatggttggatggttcggcgtgcagaactcggtgttcggcgaaggcatggcgaacattctttcgttcactgacttccttggcaagttcgagacccccgcgtggtccatcgttaccggcattgccatcacagtgttggtggttttcggagtcaaggccatcgccaacttcgccacggtatttgtgccgctgttcatcgtcgttgtgctgtatgcatccttcgtgatgttccagtccaatccgctgtcctcgctgttcaacactcctgcccctggtccggcgctttcgctgggcgccgcaaccaccatcgtggctggcggctttatcgcaggtgccatctgcactcccgattacggtcgatttttgcgtaacggcactgaggtgttctggatgaccctgatcggcacatttgttggcgagctgggcatgaacctattggcagtgctgttggctcacgccactggtaccaataacgtggtcgacatgatgatggccacctccggtgtaatcggcgtactgattgttgtggcttccaccgtcaagctcaatgacatcaacctgtattcatcatcccttggcctgtccacgatgattaatgcgctgttcaaccgtaagctcaaccgtgatgcacttgtctggggcctgggcatcgtaggcacattcctgtccgtaatcggcatcatcaactacttcactggcttcctgacgctgttgggcgtcgccattcctccggtcgctggcgtaatggtcatcgactactacattctgcgtcgcggccgcaaagatcttgaagccacccgagaagcgggcaccctgccggaaagcgtggagaagtggaacccggtggcgcttgccgtgtggattatcggattcgcagtgggcgaggccaccagcatctactcgattggcatccccggcctgaactcgctgattgtttccggcatcctctactgggtcatcatggtcgtctatgccaaggtcaagggcgtcgagaccgtggagttcgcccgcaccaagcaggtcctgtaggaggacggagcaatgccgaagattacgttggcgcagtttgaaagcaaactgtgtgaccctccggcgaacgttgtcaaggccatccccatgattcgtcaggccggccttgacggttcggacatgatcatgttcccggagatgttcaccaccggatacgaactgagcattgtgggtccgcgcatcaccgaacttgcggagcccgtgaacggcccgaccattaccgcattgcgcgaggccgccaaacaggccggtgtgtatgtggtggctcccatcgcgctctatcacgatgacctgccgggtgtgccgttcaatagcgccgtgcttatcgatcgcgaaggcaacgtggcgggtgtctacgacaagcagcatctgtgggccttggagaggttctatttccggggcggcaacggcactcccgtgttccaaaccgacttcggcaccatcggcatcatgatttgctatgacatgggctatccggaagtggcgcgcatgcttgccctgcaaggggctcagattgtgctttgcccgtccgcctggtgcgagcctgaccatgatgtatgggacatcaacgtacctgcacgagcattggagaacacggtgttcctttgtgccgtgaatcggtacggcagggagcaggacctgtatatgggcggccatagcaaggtgtgtgacccgagagggcgcgtcgttgcagagctgcccgacgagggcgaaggcgtgctgaacgtggagattgacctcgccgacgtcgtttccaaccggcagaccagcccgtacctgcgcgatcgcagaccggagctatacggcaaggtattgctgccctgatgtgaagtgtcgggaccggatcattgtttctcccatcaaaagaggaggacgatgatccggccctcgtctcgtataaaaaccgtaaatatatcagtagttcaaggagtgtgccataaccatgacacagacaacggccgtcgcgccggcacaggagccggctttcgaatcagacagccttcatattccggatagcgacaggcgcggatggtggtccatcgcctgcatctggatcggtaattccatcaacgtgtccaccctgatgaccggtgcggtactcggcgcaggactgaccttgtgggatgcattctgggccgcattcatcggttttggcatcattctcgcctacatgtgtttcgtggccatggaagcaaccgacaccggccttcccacctccgccatgtccactgcagccttgggacgcaagggcggacgctacatcatctcaatcattctgggtatctcactgatcggatggttcggtgtgcaggcggcagtctgcggatcctcattctccctgatggtcggcaagctcgggctagacgtttcgccgcaaatctgctctatcgtgctgggcgcgctgatgctcgtcaccgccatcctcggtttcgacggcgtcaagtgggtcaactacatcgcggctcctttgctgttcatcatttgcgcctatggcctgtttgcctccctatccaatacgggcatgggcacgttgacctcctacgtgcccaaggaaagcatgggactggtagccggtatcaatattgccgtgggcttcttcgccgtcggcggcgccactgtgggcgacttcacccgttacgcgcgtgatcgaaaaggtgcagtgctgtccagcatcatcggcatctggccacccatggtcatcctgcttatgatgggtgcgatgctctccgtcgtcaagcccgaatcgggcggcgatatttcccagatcatggcatccatgggtcttgccggagccgctttgatcgctcttgtgctatccacgtggtccgtcaacgtgggcaacgcctactctgcaggactcgctttcgccgtcatcgccgacaagggagataagggctatcgcgtttccaccaccatcgctggcattcttggcgttatccttgccgtggctggcatcatggactacttccagatgttcctgaccgtactttccgcgatgattccagcgctcgcgggctcgatgatcgcagattactggtttgttcgcaaggcccgtccgcaaaacttcaagccacttgacgggttctccgtgcctggtctggtttcgttcatcgtgggatcgatcgtggctctgattaccggtggcacatttgcttcggtgccggcacttgcattccttgaccacccattcttccttggtccggtcaatggcatagtcgtgtccatcgtgctgtatgtggccgtgtacaagctgatgaagctgccgagcttcgacggtcccattctgttgacgcggaaggggcagtgatatgcgtcatctcgtatcttcggacatccccgatatcgcacttggttcatccctgcttggcgcgggaggcggcggcgacccctatgtgggcggtcttatcgcccgtcaggcgttggacaaagccggcagcgtcgaactctacgatgccgacgaagtgccggatgaatggctggtcgccaccatcggtggagtgggcgctcccagtgtattggcggaaaaaggcatcaacggctgtgaaatcaccaacctgctcgctgcgcaggaagaacagttggggcgcaagctcgacgcgatcgttctgtccgagatcggtggcatgaattcggtcatccccgtagccgccgctgctattgccggcatcccgctggtcaatgtggatggtatgggacgcgcgttccccggcctgcaacaggattcgtacaacattgccggcgtgcacacctggcctatggcgttcgccgatgaaaaaggcaacgtggccatgctcaccaccgtcgacaatgattggatggagaaccttggacgtgccaccgtcgatgcgatgggcggccagggtattgctctcggccagttcatgtccggcgagacgatgaaacgcgccgctgtgcgcgactccctgaccaaggcgaagttcatcggagaaaccatccgatccgtcaaacagattgcttcggatgagggatactcttcgcctcgtgccgctctgttcgacaagatcggtgcggtgggcctgattgaggcaaagatctgcgacgtgacccgcgagacccgcggtggcttcaactttgggcgcgcacagttggatggtatccggggctcgcgcgggcacaccggagccatcgaattccagaatgaaaacctcatcgcatatcttgacggggagcccgtggccacgactccggacctgatctgtctggtcgattgcgatacgttcattccggtcactaccgagagtttgaagtatggcaagcgtgtcatcatgctggttcttccgtgcgatccggtgtggcgtactcaggcgggcatcgacctggccggcccccgatggttcgggtacgacctcgactacatcccatacgagcagattcgctccgtactcgcgtaacgtgccatgccggccgctgctggccgggattgcaacgcagaacatgtcaataacagaaagggaatgtgatgagaaccatcggtgtcgatgagatcaacgatatagccctaggtgcttcgctactgggagcaggtggaggaggagacccatatattggacgtctgatggccatgcaagccgtcaaggaatgcggcccggtaacgctgatcgagccggatgaggttccggatgatgcgttcattgccccatgcgccatgatgggtgcgcctaccgtaatgacggaaaaaggcggtggcagggacgacttcgaccgtctgttcgacttggtcgaacagtactccggcaagaagatatacgccactatgccgatggaagccggaggcgtcaactcgatgttgccgattgccgctgccgcccgtcgaggcatcccgctggtggatgcggatggtatgggccgtgccttccctgagctgcagatggtcacgttcaccatcggtggtgcctcggccacaccgcttgcttacagtgacgagaaaggcaacgccggtgtaatgaacaacgtgtccaacaaatggaccgaggacatcgctcgttcgattacgaacatcgtcggcggacaattgatgatttgcctatacacgatgagtgcaaagatgtgccgtgattggggcgtctccggcatcgtgaccaaatccgagcagctcggcaaagcgattcgctccattaaggaagggcttatcgacaccaccactgagcagcgtttccttgaactcactggcggatgccgactatttagtggcaaggtgattgatgtcctgcgcgaaacccgtggtgcattcaacttcggcaaagtggtgcttgagggcattggctccgacaagcagcatgaagcttatgtcgaataccagaatgagaacctgcaatgcgtggtggacggcgagaccctcgctacggctcccgatctgatttgcctggtggaccatgacacctatattccagtccccaacgaagccgtgagatacggcaaacgagttcttgtggtcggcctaccctgcgcgccgcagtggcgcagcgaagcgggcttggaacttgttggccctcgatatttcggcattgacacagaatacattcccgttgaagaacggtcgaagcgcaaaggagagtgaccatgtataagctaggaattgatgtcggtggaacgaacaccgatgccgtgctgattgatgagagcatgaacgtggtggctgccgtgaaacagcacacaaccaaagatgtatacggcggtattatgaatgccgtcgatgcggtactggaggaatccggtgtggatgccgcgttgatcaaccaggccatgttgggcaccacgcagtgcacaaatgcgattgtcgagcgtaagggcctgtccccaatcgccatcttgcgtattggcgcacctgccaccgagggcattcctccgatggtggattgggaggattccattcgggctgtgtgcgtcgactggacgatcatcggcggcggtttcgagttcaacggcaagcgtctcaacgagtttgacgaggaagcctgccgcgcatttctcaacaaagtaaagggcaagatcaaagccttggccatctcctgcgtgttctccaccatgcgcaacgatgacgaggtgcgtgcggcgcaaatcgcccatgagattcttggcgaggatttcccggtatccgtttccagcgaaatcggctccatgggtctgatcgagcgcgaaaacgccaccatccttaacgccgcgttgacggaagtggccgaacgatttaccgatggctttgcgcaaagcctgaaagacaagggcatcgtcaacgctgaggtatacctctcccagaatgacggcactttgatgacccttgataatgcacggcgttatccgattctcaccatcgcatgtggccccacaaactccattcgtggtgccagctacctgactcgccgtgatgatgcgattgtgattgatgtgggcggtaccacttccgacttcggtgtattgtctcacggattcccccgcgagagcggtgtcgccgttgacatcggtggcgtacgtaccaacttccgtatgccggatgttatctccatcgggttgggcggcggttccatagtgcgcgagcatgatgacggcacggtcactgtaggccccgattctgtgggataccaaatcaccgaaaaggcgctttgcttcggcggcgatgtggtgaccgccaccgatattgccgatcgtcttggcaaggcgaacgttggcgatccctcgctgaccgcaagcatcagccaggaagttgccgataaggcatatgcagcgatgcgagagatggtggaggacgccattgactccatgaagatttccagtgatcccatcgatgccattctggttggcggcggtgccgtgctgctgccgcacgatttggccggcaccaaatctgtggcttgcccggagttcgccggttgcgccaatgcgattggttcggctatctccaaggtctccggcatgttcgagaagctggttgactatgaggagaccggccgtgaagaagctctggaacacgctcgccaggaggccattgccgctgctgtgcgtgccggggcggacgaggctactgtggagatcatcgactccgaggatgtgccgctggcctattatccgggcaagaccagccgaatcaggatcaaggccgctggcgatcttcgtatggcacagactgagaaatagtggaggttccgagatgctagtgcgtcaaatgcttgagatctacgatctgctggatactccacaggccagtggagaggcggtcgcagcgctattgcgtgagcgcggcgctcaggatgtgaccgtcaccgtagtcggcggcgatcagggcaccactgattgcgtcaaagtcgtcattcccggtcgtcacggcaagtcgaccggaggtgatgcccccacattgggcatcgtcgggcggctaggcggtattggtgcacgccctgaaatgattggtcaagtctccgacggtgatggggccttggccgcgctcacggtggcgcttaagcttaccgagatgcatcataacgacgacatattggaaggtgatgtaatcatcggcacccatgtctgcccggatgcgccgaccattccgcatgagcctgtgccattcatggattcgcccatagatatggccgcgatgaatgagcaggaagtggatgcgcgcatggatgccgtgttgtccatcgacaccaccaagggaaaccgtattatcaacgttaatgggttcgcgatttcccccacagtgctcaaaggcgccattctgccggtcagtaatgacgtgctggacatcatgacccgtaccacgggccgtatgcctcaggtctttgcgttgagccagcaggacatcaccccctatggcaatgacctgtaccatctcaacagcattctgcaaccggccacggccactcaggcaccggtgattggcgttgccatcaccgtggaacaggtggttgcaggttgtgccaccggggccactcatggtggcgatgtcgaggaagcggctcgattctcgctggaggtggcgaaatccttcacctctggggcatgcgcgttttatgatgcgcaggcctatgagagactggttgcgttgtatggcggattcgagcgcttccagacgcttggcaaagcctgacggcgatttctgagatacggagtttccctctctgagggggagctggctcgcgcagcgagactgaggggagcaacgagttcgcacccgttactcccctcagtcgtctacgatgacagctcccctcaacgaggggagccaggacgtttctagcgtgccgaaatctcgtcgatgagcttgagctcatcatcgctgaagtgggtgttcttcagcgcgccgatgttgtccagaatctgttgcggcttggaggcgccggccagcacggaagtcaccttgccgtcgtgcagcagccatgccaggctcatctcggccagcgtctggccgcgctcggaggccaggttgttgaggtccgcgacttggctgtgcagcttctcggtcagtgcggaatcgttgaggaatcgcggatcgtgagccatgcggctgtcggccggaatgccgttgagatagcggttggtcagcaggccctgtgccagcgggcagaaggtgatgaggcccttgcccagcttgaaggcggtctctttcaggccgttcttttcaacggtgcggtcgaggatgttgtacttgttctggttgatgatgaacggcacgtgcagttctgccagaattgcggcggccttttccatggtcgagccgtcgtagttggacaggccagcgtacagcgctttgccggaattcacggcctgggccagtgctcccatggtctcctcgagtggcgtctccgggtccgggtggtggtggtagaagatgtccacgtaatcaaggccaaggcgttccagcgactggtcgagtgaagcgagcaggtacttgcggctgccgagatcgccgtaggggccggcccacatctcgtagccggccttggtggagatgatgagctcgtcgcggtggtgcttgaagtacttggtgagaagcaggccgcagttcttctcggcctggccgggttcggggccgtagttgttggccaggtcgaagtgggtgatgccgttgtcgaaggcggtgaagaccagggacttcatctggtcaaacggcgtgatgtcgccgaaattgtgccagaagccgagcgataccgccggcagcttgaggccggaggtgccggcgcggttataggtcatcgtgtcataacgatgcgggttgggggagtagacggcggttggctcgaacattgagtctccttgatgtgcttgaggcctgaaatctctattgtgctgcgcagccgtgtgccggatccgtgtgcagcgcggatacgttggcagttggttgcgccgtaaggtatcatggttccagttaaagtgaactttaatgcaagtggctgtgttgcttcagcgtgtcgcggctgagggcggggcggttgcatcgtgcaacgggacggtcggagagctgtgaaagatcgtatgctccgcgggcgtcaaggagaaaaactaatgacctataccattcgtcaggtggctacccaattccacctgcaaccttccacgttgcgctactacgaagagcagggattgctgaccaacgtggaccgcaccgaaaccggccagcgcgtgtatgaggattgccatctcaaccgtctgcgtgcgatctgctgcttcaagaacgctggcatgaccattgatgatttgaagaagttcttcgtctatgagtccaatgagcccgagcatatcgacgaaattctggatttgcttgaatcccgtcgcgagtcgctggacgagcagcggcgcgcgcttgacgaagccgccatgcacgtgcagcgcaaactgcactattacaccgacatcaagcatgcgattgattccggtggtgagatgcctgactgggccaactacaagacccgcgcgtattccatcgactgctagttatccgctaagccaccagtgccttgttcggcagcgcgcggtcgagcacccagacaatcagcgatatcaccaggaaggccagcgccagcctgccgcaactgatgccgaatccctgccaaccgagcttgtccaagttgatgaagtcgtaagggtacggactaccgccagccgcggggcccgaacccggccagatcgccgcgcgaatcagcacaaacgccaggtacgcggggaaatacatcaaccacgagaacatgtaatgccaacggaaccggcgatgcgggtcgaacagaaggaagtcgatcagtgccatgatcggggcgattttgtgcagcatcgtattggtcatgatgccaactacctgcggtacataatccgggttatccggcggcatcaggaagaacgccaccaatgcggtgacaatggcgtacaaggtcaggcagcccttgagccaggctggcggttggatgcccttgagcagggtggcagcgcccgcccacagcatcacgatgcccaacacaaagccggtctgaaacgtgaaatacacccaatactgcggtttcgaccatgcttcgtacgtgcccacaaagcacagtccggcaatcgctagacgccataatgccacaatgaatctcatgctttctgagtgtagccagtctttcgggtggtgacagcactccccatgagaggcaattcggactacactgatggtcagcacaatcgaacgtaggaaaggccctgtcaatggtggattattcgccggctttgatgaccgacatgtacgaatacacgatgcttgacgccgcgctgaaagacggcaccgccaaccgtaagtgtgtgttcgaggtattcactcgccatctgcccgaaggccgccgttatggcgtggtggccggcaccggtcgtattcttgacgcgcttgagcacttccatctcgatgacgaagacctgaaattcctgtctgaccgccatgtggttagcccggagaccatcaagtggctggaaaacttccacttcgccggttcgattaagggctaccgtgaaggcgagatgttcttcccgaactccccgattctgcaggttgaaggcacgttcggcgaatgcacgctgctggagacgctgattctatctgttctgaactacgattccgccgtggcttcggcagcctcccgcatggtgtctgccgccaaggatcgtccgtgcatggatatgggtggccgccgcaccaacgagtgggctgccgtagccgctgcccgcgctgctgtggtgggcggattcaagggcaccgccaacctgcttgctgctcagttgtatggattgaaggcgattggcaccgcggcgcactgctttactttggtgcatgattccgagcgcgatgcctttgaatcgcagattgaagcattgggcaagaacaccacgctgctggtcgatacctacaacatcgaggaggccgtgaagaccgccgtcgaggttgccggctctgaactgggcggtgtgcgcatcgattccggtgacctggctgcaatggcccagcgcgtgcgcaatcaactggatgctttgggcgccacgaacaccactattaccgttaccaatgatttggatgagtatgcgctggcagctttgcaaaccgcgccggttgattcctatggcgtgggcaccatgctggtcaccggctccggcgctcccacctgcgcgatggtgtacaagctcaccgagcgtgaaggcgcggatggcacgatggtgccggtgatgaagaagtcgaaggacaaggccactgtgcccggacgcaaacttgcgttccgctcttacgagtactcgctggccgaaaccgaacatgtgatctccggttccgaggagaagctggctggctatgtggcagacccggcatggaagaacctgttggtcgactttgtgaatcacggtcagattgacggccaatggcaaggtcacgatgccatcgtggcggctcatgagtaccacgccacggctttggccgaattgcccatctccgcgcaaagccttatgaagggcgaaccggtgattcccacggagactacggttctctgacgagaaccttcatctcctcggaatccgtcgcagcacagctgctcccctcacctacaggcagcccactgggccgcctgcttaacggttcggccgcggagactacggttctctgacgagaacccgccgttgagttcgtgggacgaaatctgaaattcgccatttttggcgtattgtcccacatcagcgtgggacaatacgtacgtcaaacgtttgatatgcgagttgtcccaacatcacatcattaaaaacgttggaataatgccattctcgtttcagtatgaataacacgatgctgagtgggcgtgggacgataagtcaaaaatccctaattttgcatgtcgtcccacgccatcatgaatctcagcagtcgatgggacgcaacgactccaccatttcacgggccgtgatggtgtaacgcggatggtggcgccacgtcgactggcctcggctggcctgcggcctgcgatggtgtgatggtagtgaattacccgttgttaagacaacatcgttgcactcgcagcatagggcgggtggcgtatgctggggcgcatggttgaaatcaaagatatgctaggcgattgccagattattcgtgccgacggccgcaaggttgatgaactgcgtcctgtgcgcattacccgtcactttaccgatgcccctgaggggtcggtgcttattgaatgcggcaacacccgcgtgatgtgcaccgccacttttacgccgggggtgccccgctggcgcaaggattccggccttggctgggtcactgctgaatacgcgatgctgccgcgtgccacttccgagcgcactgatcgtgaatctgtgcgtggcaagattggcggtcgcactcatgagatcagccgtctgattggtcgctgcctgcgtggtgtcatcgatatgaaggcactgggcgagaaccagattcagcttgattgcgatgtgctgcaggccgatggcggcacccgtaccgcctctgtgaccggtgcatatgtggcgctggtcgatgcggtcaactgggcggagaagcaccaccatatcaaatctgcagacaaggtgttgaaggactatgtctccgccgtgtctgtaggcgtgattaacggcacgccgatgctggatttgccgtatatcgaagacagccaggccatgaccgatatgaacgtggccatgaccggctccggcacgttcattgagattcagggcactgccgaacatcgcccgttcaaccgtgccgaacttggcactctgcttgatttggccgaaaaaggcaacaaggaactgcaagcagcccagcgtgccgcattggcactggactgagtcgttagccattcgtcgcagacttccctcagtcagcgcgcataccatggctcccctctttaagaggagctgtcgctgaaggcgactgaggggggagctcgacgcacatagcaaggaatccatcatgcaaatcgttgtcgctactcataacgaaggtaagctcgttgaaatccgccgcatccttgaggaggatttgggctctgccgccgccgacatcgaactggtgtctgccggtagtctccaccttcccgacccggtggaaaccggcgtgaccttccaagaaaacgccctgctcaaggcccgcgacgtggccagccgtaccggtttgcccgccatcgcggacgattctggtctcattgttgacgtgatgggcaacgcccccggcatcctgtccgcccgctgggctggcgcccacggtcatgacaaggccaacaatgcactgctgctcgcacagatcgaagacatcccagatgccaaacgcaccgcccgcttccgttgcgccgcagctctggtggtgccggataccgaagctggtgccgacgtgaccggtggggtgacagatggtggcgaggccgccttgtcttctgcccgcaccacggccgcggatggcggccccgctccgatctcggcgcgatacgccatcgctagcgaaacagtggaactcggcgaaatgccgggcgtcattatccgtaagcctcgcggcgagcatggtttcggctacgacccgctgttcgtgcccgacgatcagccggctggccgtaccagcaccgagcctgactatgagggcgagccgttgaccagcgccgaaatgactccagcggaaaagaatgcgatttcccatcgtggcaaggcgctcaaggccttggtcccggcaatcgaagcgctactagccgactgaactgctgcctcctgcggcggagaccatagagaccttaatacatatcaattgagccggtggctccagatgcattctggaaccaccggctcaattgttcccgtcaacacacacggctacatatgcggtcacacgcccatcagtgcgtgcgccacggccatcatcaccaatgcgatcattgccgtaatcgccagcgagaagcccgcaagcttggcgttgcccagcaccttgtcggtgaacaacgtggagaatatggcaatcggtgcgagcgagcaaatcaccatcacggcgcggactgaagccgagaacggcagcaggaaccaggaaaccagtgcgaaggcgacgctgaacggcactcgccaggcaatcacggccagcacttccttgacgtcatgcttggactgcggcagatccatcagcatgcccaccatcagcatggacgccaaggcgttcgcgccgcttaatggctggcagattgaggcaatccagtcgggaatgggcacgttggccagcgtgacgacaatcatcgccagataggtatcgaacggtaccgacccaaagaagcttttagctatggtgcctagcagcgctcgccgggcgagtcgtttggcgtccttgtctttgggtttcgtgtacggcagggtgggtgcggcgccggcatgctgctcggcaagtgtcttgccggggcggatgtgcagcaattgctgggtgagcacgttggtgccagcagccaccataatgcaattgccgatatcgaacatagcggccggaaccactgcgcctgcgccccagaacgactgcaccacggggaacgagaaacagccgaggttgaagccggctccattgagcatcaggaatgcgcggtcggtcacattgcgtttgcgtgtggccagaaaaatgaacacgacggggagcgccgcgaacagaaaagcgaacagggagacccatagcagtgagacgtcgtgcggattggtagcaaacgaatagacgatggcccccggcagcacgatattgaactcggcggtttgcaatacgcggtaatccttctgtccgaacaatccgaagcgtttgaacaggtatccggcgagcatgattagcagcaggccgaccggcgtcagtatggcggacacaactctctcccttatctagcctctgatagattctattgtccgcgtatttcggatatcgcgcgatatcatcgccacaccgtggacgagtgggtgccggaagggcggaaacaggccgcaaaccatatgaaaaacagaatctctggctcaaccgttttcggttttgaaccatcgaaaatctcatattttccatcatatttacagcgggaatgatagaagaaaacctctcagaatcattggtatttcagtggttctgggaggtcttaaccagtgcgcgagatgggacttgaacccacacgtcaaagacacaggaacctaaatcctgcgcgtctaccaattccgccactcgcgcgtgcacgccgctcaacggcaccggctcgttcggaacctgcgcgtattgggcgatatgcaaaaccctaggtggacgaaccagcctagggtgttcgagccacttgtcagaatcgaactgacgacctgctcattacgagtgagccgctctaccgactgagctaaagtggcttggttcgcgggaggcatttcgccagccgcgcacaagaagtcaagtataaagtaaccccgcgaaaagtccaatcaagaatgattggtggtgtcgcacatgatttcgctggtatgcaggcgtcgaatctttcgcgacaagtgagtcgaattccgttgggaatggctttgtttagtcgtgactgcggcctgagattgcggtattatggttaacgcaacggtgcaatcgatgtcatttatctcaattgaataattttgttctttttatgtctgaatttgtgagtattctgtttggtgatacggagcgtgtgtgagctgtatgcacaggcgctccagtcactgatgaaaggaatggaatcctatggccatcaatccgcccgttgacgccacccagacccccgagtgggccgccctgcagaagcactatgacgagcttcagtccgagggtgtcagcctcaagaagtggttcgccgatgacgccgagcgcgtcgacaagctgtccttcgacgctggcgatctgcacttcgacctctccaagaacctgatcaagccggagaccctccagctgttcgccaacctcgccaaggccgtcaagcttgacgagcgtaccaaggctatgtactccggcgtgcacatcaacaacaccgaagaccgcgctgtgctgcacaccgctctgcgccgcccggttgaggatgagggcaggtacatcgttgacggtcaggacaccgtcaaggacgtgcgcgagaccctcgacaagatctacgcctttgctgacgacgttcgttccggcaagtggaccggtgtgaccggccgcaagatcgagaccgtagtcaacatcggcatcggcggctccgacctgggtcccgtcatggtgtacgaagcgctgaagccgtacgccgacgctggcatctccgctcgctacatctccaacatcgacccgaacgacctggccgagaagaccaagggcctcgacccggagaccaccctgttcatcatcgtttccaagaccttcaccaccctggagaccctgaccaacgctcgcgaagcccgcacctggctgctcgaggagctcgccgccaacggcgctatcgccgagggtgatgaggctcagaaggctgaagccatcaagaagcacttcgtggccgtctccaccaacctggagaaggtcgaggagttcggcatcgatccgaacaacgcgttcggtttctggaactgggttggcggccgttactccgtcgactccgccgtcggcacctccctcgccgtggtcttcggcccggctcgtttcgaggagttcctgcacggcttccacgagatcgacgagtacttcgccaacaccccgttcgagaagaacgtcgtggtgctgctcggcatgctcaacgtctggtaccgcaacttcttcaaggttgcctcccacgccgtgctgccgtacgaccagtacctgcaccgcttcccggcctacctgcagcagctgaccatggagtccaacggcaagtccgtgcgctgggatggcacccccgttacctccgagaccggcgagatcttctggggcgagcccggcaccaacggccagcacgccttctaccagctgatccaccagggcacccagctcatcccggccgacttcatcgcgttcgtcaacaccccgaacccgaccaaggatggcgaccaggacgtgcacgagctgttcctgggcaactacttcgctcagaccaaggctctggcattcggcaagaccgctgacgaggttcgcgccgagggcactccggaagagatcgttccggcccgcgtgttctccggcaaccgtccgaccacctccatcttcggtgtggccctgaccccgttcgcactcggcgagctcatcgccctgtacgagcacatcaccttcgtggaaggcaccgtctggggcctcgactcctacgatcagtggggcgtcgagcttggcaagcagcttgccaagcagatcaccccggccatctcccaggacgacgaagccctcgccgcccaggacgcctccacccagagcctgatcaagttctaccgcgccaaccgcgagttctgatctccgctcctgcgtcgcttcaatcagaactcgggttggcgcgccgcgctgtgttgtttgatggtcggtctggcgaccgtccatggcgcgagttctgattcgctagcgctcggtcagaactcacggttctcacgaccgtagctgtgctgtttggtgggcagtttggcgactgcccacgtcgcgagttctgattcgccttcctcaagaaagttgactgaggaatcctgctaagggcccgacatctccggatgccgggcccttagcatatgcgggctgaagtctgtcagaggaattgaacgtggtcattccgctctgacgcctattcgcaggtataaaggtgtcttttacaaaggtcgcaggtattttgcgtcgagttagagcctcaaacgtcctccacattgacaccaaatacctgcaatcgtcttattggtgtctttatacctgcaaatatgggtcgtaaatagacccgttatacctgcaaatacctgcaaaaatataagtgagaaggttataagctcgaaataagcttataaaacggcaccttttacctgcaaacaaattcataaatggagctctcgaaataggttgcaggtataaaggcactatgtaggtcgattatcgcatcgcccgcatcgccagtgtgctcggtcgcctttatcgcgtccggtatcggaaatgatgggcgaatgccttggtgcgggaagcaacgctcaggcacccttattcgcctcatccagcgtcagcaggtcgtcgtcggcatcgtaatcgaacaattcgccgtaacggccccactccacggcgatggcgaactgctggtgtgcgtcctcgtcggaataccgcgcgtgcagcagatccagcatgagttcgccacgcagatgaccgcccgaggcgtgccgcaacgcatgttcgatattgcgtaccagcggcacatgctccattgccagcgaggcgaacacctgcttggcgcgcagaatatccgcctgatgccaagcgtcgccagcctcggtgatttgtacatggccgtcgcgcacgacgattacatgcagcagcgtgccggcatccaccagcgggaacaggtcatcgacctcgaacgagagatccgatgccaggtcagccaagtcgatgccgtccggatgttcggcaaccacatccagcaagcccgccagtccgcccggtgtggcgttcggcaacggccggcccttgatcttctctaggggttcagccgtctgcaggttggtctcatccatggccggcacgttcgcactcgatgccgatagttcgggagcctcggccttgtgcgcgggctgcgcgggctgtgtggcctgcctggtcaaaatcgtatacagcttgtccatcatcgcctcgaatgccgcgctgtgacggtcgcgcgggcgcggcaaatcgacccgaacattggcgatcagatgtcccggatgcgagcccagcaccaccacacggtcggccatctccacggcctcttcaatgttgtgcgtaaccatcagcaccgatttgatgctgcgctgttcactcgaccacagcttgagcacttcctgacgaagattctcggcagtcagcacatccagcgcggagaacggctcatccataaacagtgcatccggctgcaacaccaatgcgcgcgcgatgcccacgcgctgccgcatgccgccggacaattccttgggatatgccgattcaaagccatccagaccaatcatgtcaatggcatccagcgccagtttggtgcgcttcgccttcggcacgccgcgtgccttgagacccaactccacattgtcttgcaccgtgagccacggcatcagtgcgaaggtttggaatacgagcgcgatgccgggattcggcccggtcaaagtctcaccgcgatacttgaccgtgccgctggtgggcttgaccagtccggccagtgcacgcaagaatgtggacttgccggcgcccgaacggcccagaatcgcaacgatctcgccctcgtagaggttgaatgagatgtcgtgcagcacggtgagctcggtgccgttgtccgccgtgaagcgctggctgatgtgccgtgcttcgatgatggtgctttgcggggtcaccgctcgcagcgaacgaatggtttcttttgcgatggtcatagtgttctccttaagtccttaattttttttttggggggggggggaggggctcagcccgcttcgcattcagctaccctccctgagggggagctgtcgccaaaggcgactgaggggagctccatataacgtcattaattcagcgcgaatcgacgttcagccagtcgctgcagcggattccagaacaggcggttgactgccacgacaaacacgctcatcacagccacgccgatgatggtgcgcacggtgtcgccgttctccgtggcctcggcaatgtaagcgcccagcccggaagcggtcaacgtgtgctgtccgtagctgacgatttccgaaacgattgacgcattccatgcgccgccggccgccgtgataccgcccgtgacccacgacccgaacactgccggaagaatcagctcgcgccatcgctgccaacgccccagctggaagctgtgtgtcatttcacgcaaatcatcgggaatctggctggctccggcaatcacgttaaacaggatgtaccactgtgtgcctagcgccatcagcaggatgctgccccaattgatattcacgctgcacgccacaaaccagagcgtcacgaacgggaacgtgaagttcgaggggaagctggccagtacctgcacaatcggctgcatgaaccgcgagacccgtggattcatgccgattaaagccccaacaggcacccatatcaccgaacaaacaatggtgagcagcgccactcgcaggaaggtcagcatgccgagtgcgagcgcatgtcccaactcgtcaaagcccgcatcgcggtgaatcaccagcatgagctcgattaccccgaacgcgcttgccgccacgatgaccaccataaagagcacgtcaagtacgcggcttcgggcggactttgtctcaacggaccagcgtcctccggtgcggcccagcggccgggtcagcgtgtcgaacagctcgccgaccggctgaaagaggcggtcaagcatctcgtcgatatgagactggcggattatggtcagcaccgcactggtcttgtgtactgcggactcgctttgtgtaatgcggaatttctcggcccacgcggtcagcggtttccagagcagcacgtcaatcagcagcacgactgccaccatcgtcacgatggcccagcagattgccgcgaggttctcctcggccgccgcctgcgccacgaaactgccgataccgggcaatgcatacgtgtgattgttgactgaaatcatctcggacgcggtcaggaagaaccagcccccgcccacgctcatcatgcagttccagagcagcggaatcattgcgtttggcacgtccaacgtccagaatcgctgccagcgggtaagcctcagggagcgggccgcctcatcgagttcgcgcggctcgctggtcagggatcgggtgaacgagaacgccatattccatgcctgactggtgaagatggcgaaaatcgacgcggcttccacacccagcatcgaaccggggaacagcaccatccaaatagtgatggtggcggaaagaaagcccagaatcggcaccgactgcaggatgtccagcagcggaatcaacacgcggctgagcctgcggcagcgcgcggccgccgtgccgtacacaaacgtgaataccagcgagaagaacagcgccacgaacatacggaatactgaacgcagcgcgtaatacggcaggtcggcaagattcgtactcaccgatgacggcacgcctttcgggccgatgggctcgccgatggccggcagaatccaggcgatcaagccgaacagtgccaaaatgccggcgatgaccagcgcgtcggcggcaagacgcacggcgaacggttgacggtcggccgaggaagtggaggggtttcgtgccggcgagcttgggcgcatggcggcatggttgaacgaaaacatggtcatggaagacctccctatgcatgggaaagacaaattatgcaagggttatccggggtgggcgtccttggtccatctcagcgaggggagccaaggagcgatacgggcaggagcccgacttgacggataacggaataacgagacaagacatcatcaccgcaacaactatgactgttgccagcggcggaactactggaataatcaccgtccatcggactctcacctccttgccgtcgtgcgctcgcggcgcaaaaccataccgtcgtcggtatccttgcgaccagcaggaggggcggaaagtattcgaatccgccgattcgagccatcgttcaagctttagcatcgcagggcggtggaattgcattagttcatgccttgatccgacaagaactgttgaccagcgtgcagtgtctccactgttagcggcagcaacccatatccctgcggtagcctcgcctaccgacgctcccaagataatgcccgaccgcaagcctgtcaactacgtcgcagtgccttggcgttggaatgccatccggcagccgttctgtccgcaataatccgtacaattgacgattgctgtgtcgagaaacgggccgccgcataagcccgcgtctccacgagtccagtccgaacggctgagaagcccgactttcggcggattgacaggcttcccgagggcaaacccgaaggataacaagaacaggccaccagccatgcagctgccaaaggcgagcggcatgagcacgacggatggccccaacctggggctgatatgcggcagcactgaaggaacaacaatggttaacgctgttgaggcttttgacgccaagcacctcaagccggccgaggaaatcccggctttccgtcccggcgacaccgtcgacgtgaacgtgaagattcaggaaggcaacaactcccgtatccagaccttcaccggtgtggtgatcgctcgtaagggtgctggcgttcgcgagaccttcatcgtccgcaagatcagctttggcactggtgtggagcgccgcttcccgctgcactccccgtccatcgactccatcaagctcgtgcgtcgtggccgcgttcgtcgcgccaagctgtactacctgcgcgctctgcgcggtaaggccgctcgtatcgtcgagcgccgcgacaactccgccaagtgagtcgtcacacaggtttgatcgcgcagccgatattcggttcacgcaaataaaccgtgaaattcagctcggaaccgttcgggttccgggctgttttcgttttgctcgcgtatgatggacgcgcgccggcaacacgaccatgcccggcattatgaatcgcaaggagacaccatgcaggacgatcaggacaacggtgaatccccggcccttgacactctggaaatctggaatgggtcgagcactgcggaatccgcgactgatgagcctcttgccacccgctccgctgcatacgatttttccggcgacggtccggctgattccggtgcttaccagcctccattggacgatgatgctcgtgactcgcggaccttccaggtggcggaccacggtgtcgcgttgtctccggttcctcccgcgcccatccgctcttctcgcagttcgcgggccaagcatgccgattctgcggcggcgcgaacgggtgacgatcgattcacgctgcgtgatttcgcgatttggtgtggcacgcccatcctcatcgtgctgttggtgcgcatcttcctcgtcggcttctatgagattccttctcgctcgatgatggatacttttgtacccggcgatcgtgtgatgaccagcaaaatcttcaatctgcagcgcggtgatgtggtggtgttcaaggatcccaacaactggctgaatgaggagcaaagcaacgccatcggtggcggattcctgatcaaacgactgattggcatgcccggcgatgtggtcgagtgcaaaggggccggccagccaatcaccatcaatggtgtggagattgacgaatcatcgtacattcgcccgggagtagagcccagcgccttcccgttttccgtgaccgtcacggaagggcatgtgtttgttatgggcgacaaccgctccaattcagctgattcccgttaccatcagaacgataatgaccatggcttggttcccattgatgacgtggtgggcacaggcctggcgatttactggccgattaaccatatcgggcttctggcatctcaccatgatgtgttcaaggacgttcccgacgcgtcgtccggttccgcgtcctgagcggagccttacctgtgaagcgaaatgatgattaccccaacgcttgatcttgaacgaagccttgcctcccaaggctatgaccttattgttggctttgacgaagttggccgtggcgcattggccggcccggtcatggtcgggtgcgctgccatttgggctcgtgatttgaaaccggatgccgatggcgaattggctcaggccgatggtcctgccgcctcttcgcgtgtgtccggtgacaatggcaccgatgcaggcgtgatcaccccggatcccgctccatatctgtccgtacctgccggtgtggctgattccaaaatgttgaccgagcaccggcgtgaagccattttcgatgagttgtgcagttggtgcgctgcctatgccgtcggacaggccagcaatgccgaaatcgatgagtggggcattacctatgcgctcggcgtggccgctttgcgtgcactcaatcaggtcgagcgtgaccttggtgtgggaagcgaatttggctcccctcgggaggggagctgcctcgcggcgactgaggggaggcctttgccgagccgaaggcccatcaccatcggcgccattctcgatggccccagcgattacatcaccaaggccctcaacacctttgacgctccggatgtgccgatcccggccgacgtgaccaccaaagtcaggggcgatcagcattgtgccaccgtggcgactgctgcggttatcgcaaaagtcacccgtgaccggctgatggtctccatcgcgcagggcaatccgcgctatgccgcctatgagtgggatcacaacaagggctacggttccgcggctcatcgtgcggccatcgccgagtatgggccgactccactgcatcgcacttcatggcatttgacctgatgttgcggattgccatgcagcgcagtggccccagaccgattcgcgacacgacaatgtgagcgctcacgcgaaatcgcctcaggcgcgctaaagtcaataattaataaggtgcagcacggccgggcacggaattcggccgccagcggggaggctcaggcagtatggtgaccagccgcaaaccaaacaagcgcccatccatgttcgaggtggccaaactcgccggggtcagtcaccagaccgtatcccgtgtgatcaacgattcgccggatgtgtctgatgccacgcgtgcccgtgtgcaggccgccattgacgagcttggatatcgtccctccaattccgctcgtgccttggcctcccgccgttcacgtactatcggtttgatcgctggcggcctgaagttctttggtctgatttccgccattacctccatcgaatctatcgcccgcgaacatggactgttcatgagcgtgatgatggtgcatgagtctctgtgcacgcagtccgacttcgacaatctgtgcgacaccttcaatgagcagaacgttgacgccttcattttcctgaccccgactgatgtgatgttcgctgccgcctgccgtgcgcgcgtcaaccagccgcgtgtgattgtgacctccacccacggccagatgaccgtgcgcgaggggatgagcctgatttccactgcaaacaaacgccgtacggcgatggtcggcatcgatcagtggggagcgatggccaaggtggtgagtctgctgggggagtacggccataagtcagccctgtacttcgctggcccgaacgagtggcgtgacgcccatactcgccttgacgcttggcgcaagctggccgcggcccgatctattgactcgcagatcgtgcgctgtcacacttgggatgccgatgaggcatatgcgcatatgaatcatttgttggacgagtatggtcgcactggtgtgccgctgcccaccgcagttgttgccgcgaacgacaatcaggccgttggcgttgtgcgctcgctgcatgagcatagcctgcggattccgcaggatatcagcgtggttggcttcgatgacatggccggtatggataacctgtatccgccgctgactaccgtgcaccctgatttcgaggggctcggcgtggccgccatgcgtgagacgctgcgactgttgggggaggggacggaaccgacgttcctgtcccagcagcatggcgtggggttgattcccgctgagatgtgtgcccgtcgttccctcggtcccgccccgcggaggtagaacagcggattagcttttttggggcattctctcggtcaaaccgctattttgctgtgctgagtgccgttcagcggggtggattatcggtttgctcgtggttttgcttcgctgagtgccgttcagcggggcttatttcccggttgctggtggttttgcttcgctggagggcgtgccggttggcccgttccgcctcgtcggctccgaggccatcggtgagggcgtcatcgagaccctgaagaagtacccgaagtccccggctgtcctcatgcagaaccatggccgcaacaagcggacgttcagtggccataacgcagcattccttcgtctcgataaatattgccgccactgtatcgaattgatgttaaccgtcaaaccaatggcaacttgagcaggtaagtccagatggtgacgtcgatggagactgtgaaatcgcctccaagatgggcggtggtgccacgtggcggtatcggtaagtgcttacctacaaaaatggaagaggaccggcgcggggcctcttccattatcagattggtcagattagggaacggtggctcaccgcttgccgttatagatttcgctgtcgatcgcatcggcgaacacgcggttgacagccgggcgcaccactttgagggacggcgtcaggcacttgttctcctgcgtgaattgcgtatccaacacggcgaacttgcgcacggactcggcgcgcgaaaccgtcgcgttcgctttatccacgtactgctggatctcttcgcgcactgcggcgttcgtggccagacggtcaaccggcgtctccgtggacagtccgtgtgcgggcagccagatggccagcgactccgggtcgagcgtcaccagcgcgccgatgaacgggcgctggtcgcccaccaccacgcaatgctccacgatcgggcacttggcgatctcctcctccagcgggatgggggagacgttcttgccgccggcggtgataataatgtccttgatgcggccagtgatgatgatgcggccctcgtcatcaatctcggccaaatcgccggtcctgagccagccgtcggcggtgaacgcctcggccgttttctcgggcagattatggtagccgcggaacacgttcgggcccttgacctgcagctcgccctcatcggaaatacgaatcgaggagccgggagcgggctggcccaccgtgccgatcacattgtcggtcacgcgtgtggcggcgaatggggcggcggtttcggtcatgccgtagccttggatcatcggcagtccgatgccgttgtagaaatgcgccagatcaagcgacagcggcgctccgccgcaagccacgtacttgatcttcgggcccagagcgccacgaaccgtgcggtagacgagcgtctcgtacttggcgcgctcggcgatctcggcaaacgtatgctgctcgcccgcctgctccttgcggctccagacgcgcgctgcctcggcggccttcaagaacaggcgacccttccagccggcgccggccttgtgcgaggcggcgttgtacactttctcgaacacgcgcggcacacccagcaggtaggtcggctcaaaggaacgcagatccggcagcagcgacttggtgtccggcaggtagccgaccacgccgtcgtcggaggcgatggaggcgtactggatgaatcgcgcgaagcagtgggccaacggcaggaagagcagcaatcgcgggtgatcgtcgagaaccacctcatgcagcgcctgcgaggcggcgatggtaatggacacgaagttcttgtgggtcagctccgcacccttcgggttgccggtggagccagaggtatacacgatggtggccaggtcattggtgcgcacggtggccacgtgctcgtccagctcttcgtcggagacagccacgccgaggccttccaaagcacccagtgcgttgccgtcaatcataagaatctgcttcaacgtggggcagtggtccttgaccgaatcgagccggtcatagcgttcgcggttgtcggcaaaggccagcttgaccgcggaatcgttcatgatgcgctgggcttgcggggcggagtcagtgtcgtaaatcggcacgctcaccgcgcccactgcagccagcgcgaagtcgaggatgccccattcaaggcgggtggaggagaagatagtgaccgcgtcgcctttggtgatgcccaaagcgatgagacccttggcggcagagaccacacgctcgtggaattcgccggtggtgacgttctgccaacgccccgggccgattttcttggctgcgattaccgtgtcggcaccggtgcgggccagtcggtcggtgagcagtgaatagatggtttggtcatcgcggatctcgatggattcgccgggcgtggtgtattcggtaagcatacggccgttattccttacaaacatgatggcgggttgacaattcgagccattctgacagcacaggttacgcttgcgtaagatacggcgcgttgtacgcactgaaaaagttgcgcggatgcttttgtcggttgtctacaagggcgactgcagaagtgcgctgtcactgtccgtcatcggttgtccagaaccgtggatgtattgccagtcgcctggcgccgtgcgagtaacacagtgcatcaattgtgtaagtggcttggcacaatttgtatgaaagataacggtttgacaacgatttgccacaaagtcccatttaggggtccgtacgggctgggggcggcatcgagctcgtgttcaccgtggtgggcatgtacctgattgataccgccggccgtaagaagcttatggctgtcggctccggcctcatggtgctgttcgcgcttggcatctccttctcctacgcgaacaactaccagctgctcatgctcatcttcgtgatgtgcttcacttcctgcttcgccttctcgatgggcccgattccgtggattatgattccggagctcttcccgacctacctgcgtggctgcgccaccggtatctgcaccgtgtttctgtaggccactaactgggccatcggccagttcaccccgatgctgattagctccattggcggtatgggcaccttcctcgtgttgcctgcaccaacctgatctgcttccttggtgtggtcaccttcgtgcctgagaccaaggacaagacgctggaagagatcgccgagctgtggaagccgaaggacgagaagcagtccaacgcccagctcgaagtggtgcgtgccaccgccgaccccaagtaggccgagtccgacatcaaggccgccgaggccgagctggcccgcgctcgcccgtgccaaggagcgtgccatcgccaccaaggccgcagccgaagcgctggccaacgcgcagaagcagcactgattcccagctgcttgcttgctctgtgtgaatagccgtttgtagcgtaattttcttcgaaaagttgcgcgcagacggcttttttcatgcctcttttgcatggaatcggtgccttgtaactgtgaaaacgggatttatggctgtggttgcgacctcgactgtggccggggcgtggctgtgggtgtggacgtggccgcgactgtgcgatgccgggcaaatgcgcaaattctattttcaggaaaagagtgctccgcattatgcggattcgtattcgggaacggaaatttggtgtgacggttgtctcggtcgaaggtctggcgtgtatatgcgcttttgcctagggtaataggattgcgcgcaatgtgccccaccggtatgtatgagtatgcgatcggtggcacacgcgactggacgtatgacgagacctactgcaataacgcggcagtcaacacggcgaggggaaacgaaccatgttcgacaaacgactgttccaattggcgcccggcttgaaaaaactcatagccggcaaagtggccctgatgtgggtaggtctgtttgccaacattggttttatgctgtcgctggtaatgctgctgaacagcttgctgaccgctgtggcaccgccgctgctccaatgcggcggcacttcgcaaggcgtggcctgccctgtgccgttgtctgatcagcacggcgcggatgtgctgcccatggctggcgacgtcatgatttacgtgctgcttgcgctggtctgtatagcggtccgttacacggccaccacgcatgccacctgtctcggcaccgaagccgccgagcgggtcaaactggctttgcgatccaagctgtaccgcaaaatggtggcactcggcccgtcctacaaaacccgcatcaagacctcggatgtggtgcaatccgccggcgaaggtgttgaacagattcaaagcttctttgaactgttcctgccgcagctcttctatgcgattcttgcgccaatcaccttgttcgtggccattgcgccgattaacgtgcccgctgctgccgtcatgctggtctgcgcgccgctcatcatcatcgtgaccggcatcgtctccatgaccgccgcccgcgccttcaaaaagtactgggtgcgctacaccgatatgggcgccgcgttcctcgacaatctccaaggccttgagaccctgaaaaacttcgacgctgacgagcgcgccgccatcgagatggacaagaaagccgaaggcttccgcgtgatgaccatgcgggtgttgcagattcagttgcgttcgctgaccgtcatggacatagtggcctacggcggtgctgcggccggcatcggtgtggcgttatggcaatacacgcatattggcgatgcttttgccaatggtacgtccggctggtcgccaatcgcactggcctcacatctgcctggtgtgcttgcctacgcggcatacggcctgcactatctcatcccgttcggggtgggctacccgctgtctcttaccggtctgctgttcatcgtgctgctgtccgccgaattctttattcccatgcgtcagcttggctcgttcttccacgtggcgatgaacggcatgacctccaccaagcgcatcttcgctctgctggacaccccggagcccgagcatggcacggcgaccctgccggccaacgattccgattccgctgacgacggtctgacggtccgcttcgaccacgtcggctattcctatgatgatgccgggcatggcgactccaagtccgcatccgcaaaggccgataagcaaggtgaaaccagccccaattccgccgtcgctcctgcgctcaccaacatcaccttcgccgcacagcccggtcagttcaccgccattgttggcatctccggttccggcaagtccacggccgcctcgctgcttgccggtacactggccggttaccgaggttcgctcacgctgaacggcgtcgaggtatccgatttgtcaggcgaaacactggctggagccgtcactgtgattggtgccagcagccatctgtttgcgggcacattgcgcgagaatcttctgatggccttgcccgatgacgagattcctgatgcgccggattccgtggactcccgtttgtggtccgcgctcgagcaggcgcgcattgccgccttcgtgcacgcacagccgaacgggctggacatgccgattgagtccgatgccgccaacctgtccggcggccaacgccagcgcatcgccatcgcccgcgcgctcctgcatgattcgccggtatttgtgttcgatgaggcgaccagcagcgttgacatggaatccgaagagctgatcctggatacaattcgcgaattggcgcaatcccgcggcaagacggttattatgatcacccatcgcatggccaacgccgaacacgctgatcaagtggtggtgctcgaacacggcaagtcggttgagaggggcacccataccgagctgatgacggcggacggcgtctacgccaagctgtttaccacgcaggcagatattgagaacttcggagaaggccatgctcggcgtgtgctgcaggttggttcccgcaagcaggagccgtccgacgacagtcggactgagggtggcgcagcgcgcgtaagcgcagaggcgggtatgacggttgaccgcctgcagtcagctttgccgacggcttccgttggcgggagtgagcaggcctcggctgagactccggctggtgctgcaaatagcgattcgtcttccaaaatgagcacattccaagtgatcaggcgactgcttaaggaagcccgaccgctggcaggactgatggcagcggcctccaccgccggcaccatcggccatctttcggccactttcctgcccgtgttcggcattatcgcggcatttgcacttaccggtaatccggtgtggggcatgggtgttgcgcccgccgtcatcatgatgattatctgtgctcttctgcgtggcatcacccgatacattgaacaatatctgaaccacaatgtggcattccatctgctcgcactcttccgttccaaggcgttcgccgcgttgcgcagactggcgccggccaagctcgcgggcaaaggtaagggcaaccttatcgccatgttgaccaccgatgtggaactgcttgagatcttctttgcccacaccatcagtccggtggccatcgcggtaacctccaccatcatctacacgattgtggccgccaccctaagcccatggatggcgctggcgttgattgctgcccacctggttatcggcatccttgtgccgcgattctttgccaccggcgtacgtaaccttggccctgccatccgtggcgctgccggagaactcgacaatgtgatgctcgatgacatgcgcggcctggacgaaatcatccgatttggccgcggcgaggagcgtgcgcaggccatcgaggaccgtacccatgcgttgtggaaggatcacgccaagctcagcaaggtcaacggccgtttcaccggaatcagcggactcttggtggctgtgctcgcagcggcttcggtcgccgtggctattgcctgtgccggcgcgaacccgcagagcattccggctctgattgctgccttcgtgctgttcgccagctcgttcggaccgactttggcgctcaccgccttgcccgctaacctgactcagaccttcgcgtccgctagccgactgttcggactgatggacgaggtgcccgctgtgaccgagaacggcactgttgtgccgcgggagtatatgggcatgcgtcttgatgacgtcacctttgcatatgcgggggagcacgaagtcttgtccgacttctcgcttgacgtgccgcagcatggcgtgctgggtatccaggggccgtccggctggggcaagtccaccatgctcaagctgctgctgcgctactgggatccgcagcgcggtcaggtgacgttgtccggcacgccgctgcccgaggtcgatgtgcatgctcgccgacgtattcaagccatgatgagccaggaaacccacctgtttgatggctccatccgagacaatctgctgattgctttgcctgagtccgaggttgaagctgcaaatgttgcaggcaatggggaagtgggtgccaagactgttgattcccgacagcagcggttggcggcgcaatcggcagagggcgatgccgttcaggtggcagcatctgacggtctcgacgctcgtttgcgtcaggctctcgccaaggcctccgtgcttgatctcattgattccttgcccgatggccttgatactcaggtaggcgagctgggcgaccgtctatccgaaggtgaacgccagcgtatcggtttggctcgtgtgttcctgcgcaatgctgatctggtgcttttcgacgagccggccagccgtttggatgctttgaacgaggctattattctacgttccattcacgctatggccgtgggtgagcagcatgcagacaaggagcgcggcgcggctgtggtgctggtctcccaccgtgaatccgccatgcgcattgctgatgcggtactcaatctgtaactgcctgtaactacgcgggaatcacatcgcattgcgttacgttaccgcgttgcattgcggttcctcgcgggtggcggcgatgccatctccggttgtcattgcgttgctgcgtttgtgttgcgatatgtgatgcggcaacgcagcaatgcggcaatgcaatgtgatgtggcaacgtggcaacgtagcgatgcaataacgcggcagcatggcaacatggcaatatggcaatgcagtaacgcaacgcagcattcacgccttgatcaaagcgccgatgacgagcgccttccgcagccccgggcggaacaggtcgtgaaattcatgcgacatttcggtttcgagtttgaccgatgcatggatgtcgtcagtgcgaaggcgtgcctgttcggtgccgatgatgtgctcgagcgccgcgaatccctcttcggttctgccggcttgaatgaggaatcgtgggctttccggtgctcgcaccatggagagcaggaacgcggcggccggaatcgcacccagccccagcatccaacgccaaccggtgttgacatcccagcttctggaaccgtaggaggcgatgatgtagttgatgacattggtcaggaagatgccgcataccgcgaggagctgatagggaaaggcaggcagaccgcggatattggccggcgcttaaggccaggccgaacgtatatttgcctgattcgtgagtacgtatggttgttcccaagggattgcgctgcttggaagcagcttgaaacaggcccgccatgtgctcttcctctcaatacagctatgggggtgcctgttcatactggtcagattcttgtcatatggcgttggatgtctgcaaatatgggcattagtgaggcggctgagtggtggaatcgcgccgtggtgtgtggtgttgaagactcacgagcatgctacgcgttatttggtggtgtgctgagagtcgggacctactcacgttggggggggatgaagagcctctgagacaagtcgctgttcgactggagatttgctcacgtggaaagcgtggaaaaggcgaaaaaatcaggcgtgttgggtgattttgacaaattggtacacaggtgtatcatcttaggtattggtacacgggtgtaccaaagaaaacaccccaaggaaaggtggccagaggagacttcgcaagcggccaaacgaattgaaatccaacgcagcagtcgattcgtttttggcaatcggaaggcagccaaagacagccggaagataaccgagaagtaaccggacgaaaaccggaagccagccggaagaaagccaaccacccgcaagccaactccaatggtccaggaggagataacatgcgcaacaccaagaaggtcatcgcggcaacggcagccgtggccacgctcgtcggtctcgccgcctgcggcagcagcaacgacaacagcgtcaacaagggtgacgccgacaaggccgaactcgtgttctggggctgggattccggcaactcgatgaaggaaatcctcgctgacttcgagaaggccaaccccggcatcaccgtcaagttcaacaacaccggcaccgccgagaagacctccaccgcgctctccaatgccatcgccgccggcaatggcgccccggatgtcgtgatgctcgaagatccgaccgtcacccagttcgccgtcaccgatggcctcgtggatctgagccggttcggtgccgacaagctcgccgacgacttcgccgccggcccgtggaacaagctccagtacaacaacaagccgtacgctcttccgattgattccggccctgaaatgttcttctacaacaaggcagtgttcgacaaggccggcgtggacggcgagtccatcaagacttgggacgactactacgaggccgccaagaagattcgcgccatcggctcctacatcaccaaccttgccggcacgtccaacgactaccagcccttcaccgcccagatctggcaggccggcgcccagccgtggaaggtcgatggcgagaacatcactatcaacatgaccaaggacgagggcatgcagcgctatatccaattcgtccagaagctcatcgacgaagacctcgtggacaccaagaccccgaactggtccgacgattggaaccgcgagctcaacgatggcaccctcgcctccctgaccatcggcgcttggatgccgatcaacctcatgaccggcgcccccgatcaggccggcaactggcgcgtcgcccagctgccgcagtgggaggacggcaaggaagtctccgccgaagacggtggctccgcacttgccgtcacctcgcagtccaagaaccaggccgctgcctacaagctcgttgagtacatgactcatggcgagggcgctcagaccatggctgacaccggtaccttcccgtccctgaagaagatcctgaagtccgactccttcaccgacccgaccaccgggtccaacaagaagaccaacgactacttcggcggtcagaacgtcaacgaagtcctttccgccgcggctcagcgcccgaccgagaagttccagtacctgccgtacaacccgtacgcccagaccacttacggcgacgaagtctccaaggcctactccggcgacatcaccctggaggaagcactccagaactacgccaagaagctggccgagcaaggcaagcagcagggctacaacgtcaccgtcaagtgacgcaatccgatctattgccggtacatccggcactgaccaacaatcaaaatctgcggctaggccactctccttccgcctagccgcccgatctcccacagcggggatgctccccagtgtccccgctttcccatgccctcacctgacgtgaccgctccaatcgagtggccccctgatagcgggcgcagcacagcaatccgtatcccaagaaagcaatcgattatgtccgatcaaacaatggccgcagcctcgcagccaacggtgggaatcctgcctgaggaggcggatctgcacacggccgaggcccgcgtcaacaagcataaggccgattggcgtggatggaagttcatgtggccgttcacggtggtgttcgtgttcgtgttcattatcccgatcgtgtacgccgtttacatcagcttcttcaagaagcagatgatcggcggcacgaggttcgtcggggtcgagaactacgcgcgcctgctgcaggacggccagttctggtcgtccgtgggtcgtgtggcgctgttcacctgcgtgcaggtgccgatcatgctgttcctgtcggccgccatggccctcgccctggattcgatgaagctgcacggcgccaagttcttccgcatcagcacgttcctgccctatgcggtgcccgcggtggtgtccacgttggtgtggggcttcgtgtacggcgcgaagtacggcctggtgggctcgttcaacgacttcttcggcacgaacgtcgacgtgctgcagccgagcgtgctgcttgcctccatcggcaacatcagcacgtgggagatcaccggctccctgatcacgatcatcccgctggtcatcgcgttcctgtgcctgcagaagtactggcagtccggcctcgccgcaggcgctgtcaaggagtagttgctactccctctggctctcctcagagaggggagctggagaaatggggtcttggcttccctctctgaggagagctgtcgaacgcagtgagactgaggggagccaaagcccaaaaccggcaaacacaacaccggccatgagccgatacaataaaggatttgattaatatgactactcgtagagcatttaggtggccgtccctgctgacggaatccggccgcggcatcgcgttcggcggcgactacaacccggaccagtggcccgaggagacgttggacgaggatatccgtctcatgggtgaggccggtgtgaacgtcgtatcgctggcaatcttcagctgggacaagatcgagccggtcgagggcgcgttcacgttcgagtggctcgaccatgtgatcgacaggctcggcaaagccggcatcgccgtggacttggcctccgccaccgccaccgcgccgctgtggctgtacgaatcccatccagaggtgctgccggtagaccggtatggtcatatcgtcaacgcgggctcacgccagtcgtggcagcccacaagcccggtgttcaaggaatacgcgctgcgcctgtgccgcaaacttgccgaacactacaaggacaacccgtatgtgaccgcctggcacatgggcaacgaatacggctgaaacaaccgctacgactactccgacaacgccttggccgcgttccgcacgtggtgcgaggccaagtacggtaccatcgacgcgttaaacgaggcgtggggcacggccttctggtcgcagcacgtgaacagtttcgacgaggtgttgctgccgcgtcacatgggcggcgacgccatggtcaacccgccgcagcagctcgactatgagcggttcggcaacgacatgctgctcgacttctacaaggccgaacgtgacgccatcgagcagatctgccccggcaagccgttcaccacgaacttcatggtctccaccgaccagtgcgttatggactacgccaaatgggccggcgaggtggacttcgtgtccaacgaccactacttccatgaaggcgaatcccacctggacgagctcgcctgctcggacgcgctcatggactccttcgcgctgggcaagccgtggtacgtgatggagcactccacctcagccgtgcagtggaagccgctcaacgcgcgcaaacgggccggcgaactcatgcgcgactccctggcccacgtggccatgggcgccgatgccatctgctttttccaatggcggcaatccaagtcgggcgctgaggcgttccactccgccatgctgccccacgtgggcgccgattccaaggtcttccgcggcgtatgcgagctcggcaaggcgctgaagaccctctccgacgccgggctgcagggcactgagctcgagcgtgccggcacggcgatcctgttcagcgcggaatccgaatgggccgcacgctccgaaaccctgcccagcatgaaactcaaccactggcacgacgttcgcgactggtaccgcggcttcctggatgccgggctgcgcgcggacgtggtgccgctcgcctacgactgggccgactacaaaaccatcgtgctgcccaccgtgctcagcctgtccgacgaagacgttcgccgtatcgccgacttcgcgaaggccggcggaaccgtcatcgtcggctacgccactggcctgatcgacgagtacttccacatcgggctcggcggatacccaggtgccggcaatggcctcctacgcgacatgctcggcatccgcagcgaagaattcaacatcctcggtgaagaagccgaaggcgagcccagcgaaatcagcctgtccaacggtctgacgacccacctgtggcagaatgacgtgacttccgtagccgcggacgccacagtgctcgcctcttacacaggtgagtccgccgccgactgggagctggagcgcactcccgccatcaccagccgtccctatggcaacggtaccgccatctacgtgggctgcgacctcaaccgtcacgacattgcccagctgctcaaagcacttggctcccgctggcgggagctgtcggcgcagccgactgagggtggtcaaactccaacctatcccaccacagatccccgcatcctgcacaccatccgccgatccgcagacggctccacccgcttcgatttctacctcaaccgctcaaaccagcccgtcgccatcaacggtgtggaaggcaagcccatcatcgcccaccgttgcgagacggatgccgtcggatatacgctgaaccgtaacgctattcttatcgctaaaacgtcctgctagaccgcgctagaatggcaatgttgtccggatggaggagcgcggcatgagcgacgagaaaacagccaagcgtcgagtgacgctacgcgatgtcgctcaggccgccggtgtatcgctcaaaactgcgtcgaacgtgatcaatggctccggacgtatgaccgatgagacccgtgccaaggtcgagtcggtcattaaggacctcgactaccgagtcaacgtggccgcccgcaacctcaaccgcaatcacaccggtttcatcacccttgccgtgccttcgctgattccgccatatctggccgagttggccaaccgcaccatcgaggccgcccgccagcgcaactattccgtatacgtcaccacgtatgcggaaggctccgcgaaaggcgcgcgcgatctgctgaagaagttcaactccacggtgtccgatggcatgatcctttccatgagcgaggtggaaaacatttcgcccgatgatctgaaggttgattttccgctggtcatcgttggcgcgcgtaccacgtggggcattgtggatcacgtgaccccggacgatgtatccgcagccgccatggccgcaggctacctgtatgaccgcggttccaccagacttgcagtgatcggtgcccgtgacgtttacgacgaagatgcattgctgaatgccgtagaaggcaacgcgcagctgcgtctgcgcggcatcatcgaagagacccgcaggcgtgggctctccttggatccgcagctgattggcaacaccgatcaggattggaccatcggagccggtgcccgtgtgacccagcggctcattgattccggcgtgccgttcgacggtgtgatcgccctgaacgatcagttggccatcggcgcattgaccgctctgcgcaccgctggttatgaggtgcccgcgcaggtgcaggtcatcggcttcgataacaacgaggaagccccctacctgcagattccgctgaccaccatggattcccgccttgactggacggctcccacggcagtgaatcgcatcctcggacgcatcgacggcagcatcaccaagcccgaactgctcaccaccgaatcccaagtcatcgcccgcgcctccacacgctgacatgcgcctctccgtgtacagtggcgtgtagtcgcagcaataaaggagcatcacaagccatggccgacggacatattaaccccgccaacgtgccggacatcgccttgaaagacggccattccattccgcaggtcggtctcggcgtgctacgtatcgacgacgagggcctggcccgcacgctcggcgtgtgcaacttcatgcccgccgacctgaagcggctgcacgaggagaccggcgcatggccggccgtcaaccagatcgagctgcaccccacgtggcagcagcgcgaagtggtggcgttctgcaaggagcacggcatcgccgtggaggcctactcgccgatggcgcgtggcgccgacctcaacgccggtgacggcaccatcgagaagattgccgccgcccatgaggtcagcccggcccaggtgattctgcgctggcacatcgaaaacggcaccatcatcattccgaagtccgtgcacgcagcgcgccagaaggaaaacctcgacctgttcggcttcgagctcaccgccgaagaacatgcagccatcgatgctcttgacggtccgacccgcgccggtcatgaccccctcaccttcacctacgcctgatgtctccgcaccgtcgtccttaccgttccagcgctcacttcagccgccgcttcaacgcctccgggccactggagcgtgtgcttattctcattgtcattgcggcggtcattggcattacggtcggcctgctgctgccgcgagtcaatcctgatgcagccaagctcaccggcggatacaccgccaccggttccgccgctgacacgttgaacaagcttaccgtggatgacaaccagagcgcacatggctacgaccgcgattcctttgcattccgttccgtcgataccgacggtaacggttgcgacgcccgcgatgatgtacttgcccgcgacctgaccgatgtcaaatacaaatacgctggttcctgtgtggtgatgtccggcacattggatgacccttataccgggcaaaccatcaacttcgtgcgcggccgcaccaccagcgccaaagtgcagatcgaccatgtggtagcgctcgaaaatgcatggcagtccggtgccaacaagtggtccgcaaccaaacgtcacgagtttggcaatgacccttataatctgctcgccgtggatggccccgccaaccaggagaaaggctcagcctccgccgcttactggctgcccaccaacagcgaataccgctgcgactacgtggcacgccaaattggcgtcaaagacaagtaccaactcaccgtcacatctcaagaaaaggatgccatgctcgccgtcctccacacctgccccggccaagccgtgccagcggattaggaggaagaggctatctcgagggattatccagtagaggagcgtgcccctcgtcaaatgctcgtagcagtcgtcgcaagagaaatgtggcgaagtaaggtgcagtaaacacatgtttactactgccgatattgcctgcagataatttcacgccaaactgaatctccggatacgagtcagaagagatcaacgttcgcatagatttggcagtagtaaacatgtgtttactgcaattactgcgattctgcactttcatgagcgagtttctggtgacgtagcatatttcatgagtgagataaacggcgtatcctctgttgactgactcatcattcgccaattgtccgcaaatcgtttgtgtattgacacccgaaacatgcctgcgctataactgggcgcggtatgaaggaaataggggaagacgatatgacagcaccacacacggcagcaagcgccactgcggcagacattgagcaggaaacgtcggaaatcgagaaggaacgccgaatcgccagcgatgaggcgaacaacaaggaaaatcctcatggccatgcgctcgctagcattttggggcccgcgttcgtggccgctgtggcttatgtggatccaggcaacgtggccgccaacatcacgtccggcgcacgctacggctacctgctggtgtgggtgctggtgctcgccaacgctatgagcgtgctcatccaataccagtccgccaagctcggtattgtgaccaataaatccctgcccgagttgctgggcgaacgtatgagcgacgccggccggttcatgttcttcatgcaggccgaggtcatcgccatcgccaccgatttggcggaggtgattggcggcgccatcgcgctgaatctgcttttcggtctgccgatgttcctcggcggcctggtcatcggtgcggtctccactgtgatgttgtggttccaaggcggcaaatcgcaaaccacattcgagcgcatcatcatcgtgatgctgctggttatcacgttcggctttatcgcgggtctgttcgtggccccgccgaatcccgtcgaagtggccaaggggctgattccgcgctttaagggtacggattcggtgttgatggccgcttcgattctgggtgctacggtgatgccgcatgccatctacctgcactccacgctggtgaacgaccattacgcgggcggcgagaagccatcggtcgagcgtcagctcaaaggctcgaagattgatgtggcttgggcgttgttgctggccggcacggtgaatctggccatgctggtgcttgccgccaactccctgcatggcatgtcaggcacggattccatcgatggcgctcagcgggcgattgcgcaggtgctcggcccggtgattggcacgattttctccatcggcctgctggcttcgtcgttaagctccacgtcggtcggcacctatgccggctcggaaatcatgcacggcctgttgcacgtcaacgccccgatgtgggcctgccgtgtggtcacgctggtgccggctctgattgtgttgtggttcgccaagaaccctacggaggcactggtgattggtcaggtggtgctttccatcggcattccgtttgccgtgatcccgctcatgcgctatacgcacagcaaggaactcatgggcaaatgggctgacggcacagttaagcacatcatcttcctgattgtggtggcgctgattgtggccctcaatgtgctgctcatcgtcctgacattgatgggacgggcgtaagaagctgatgagctcgctcccgccagcgggagcgagcagcttaccgagccatacgccgtgcgcggcgttcgcgcagcgcacgcaaggaaataatgtcacgcgtacgtccggcaccgtcgcccttgacaccgaaaatcaccatcagcaccatcacaaagcacagcagtgcagagaagcgaagcgcccactggatgccaaagatggaagccgcaacggccgaggctcccgcctgatgcctccatgcggcgaacgtttccataagaatcaccagcacgggtgcacccacggcgcccgcgatttgccgcgcggtgttcgtgaccgacgatccggcagacacctcatccggcccgttcaggcagttcagcgaccatgtggtaatcggcataagcaggaagcccatgccgatctgacgcgtgaactggcaaatcgacacccaccaaatccatgtatccatagacaccaaagacatgccgagcgtaccgacggtcagcacaatcgagccgcacagcgccacgggtcgcgcgccaaaacggtccatcgcccgcccgccgaagaactgggaaacacactggccgagggcgcccggcagcataatcaggccgctcatggtggccgaatagccacggtcggtctggatatacagcggcatgatgaccagaatcgagctgaacgcaaagaacgtcagagatgccgtgatggtgccgacggtaaaggaccgattcttcagcactccaagatccagcagcggaggctgggggagtgtggccggctccgctcccgactgcgccgccttggcttcgcgataccgccgaccgtgacgcaggttgcgcatcacgaaccatacgatgccgaccaatcccacaaccatcggcccccacgttaccggagcggcgaatccataggtctccgaattggtgaagccgaacatcagcccgccaaaaccaatcaccgacaggctcaccgagaagaaatccgcgcgggccgacgggtcatgagaaccgaagttatgcagtccgaacatggccgccaccagcgagaccacgccaatcacggtcatggtcaggaatatggagcgccagccgttcgcatcggtttgccagccgcccagcgtggggccgatggccggtgccacactcatggccatgcccaccgtgcccatcgcgaatccgcggcgagacagaggataaatggaaaacacggtgatttgcagcactggccacatcacgcccgtgcccgcggcctcaagcacgcgcccgagcagcacccagatgaagctcggcccgacccaggccatcagcgatccgaccgtgaacaccgccattgagcaaatcacgatctggcgggtggagaagcgcctggtcagaaacgcggtcaacggcaccatcacgcccatgaccagctggaacacggaggtgagccactgcccggtggtcacggagatatgaaactcggaaacgatgatcggcagcgccgagctcagctgcagctgcgtgaaattgccaacaaaggtaataaaggtcaggattgcgatggaaataaatgccgcgcggctcagtttaccgtccacgtatgattcctcacggctcagtacccgctgcaattcgccgcgacgattcttgattccctgagctccagtcacgcactaccccacttctgttgcccggcctgttgccttggcggtgtcggtggcgtatctgttcagtgatatatgcgcctcgcatatcaatgcgtattcggtgtattcggcgaccgtcgtcttcgcgtgcttggccgagcagcctctcaaagcaccccaatacgctatacccaggggtggtccagtcggttcggaatatgtgcagaagcgggggcgaacacgctttgtgcacaagaccggggcataataggcggttggttattgcaagaggttacaagtcaataagatcagtttgggagttagtatgagcgttcatagagccagtcacgcaacaagtattccacgcagaaggcaccgcatctggccgtgggtggtgttgattctggcgctacttgtggtgctgctaggcgtgagcggattcttcggtttgaagctgtattccgaagccaagcaggtcaaggcgcatgaggaacaggcgatgcagctgctggacggtgtgaccgacctcggtaacctcgacaacctcgatacggtgagccagcagatcagccaggcaaagaccgagaccgcggctgcgaacgagattgcgcacggcacgctgtggaacatcgcttcgaaggcaccggtgtacggcggtgacatcaccactgtgcagggtatgacttcggtggtggattcgctggtcagtgattcggtgccgcagttcatggacgtgctttccacgctgaagagcgcacagctcagctcaggcgacggtcagctgaatctgcagccgattctggaagcccagaagaatattgccaccgcgaaccagtcactgcagcagcaggtgcagaagtatcagcagctgccgaaggcccatatcggcatggtgaagaatgcctatgccaccggcaatacgcagctgaccaagatggcggacaaagtcaatcagctgtccggcacgttccagattctaccggacttccttggctccgatcagccgcgcacgtatgcattgatggctatgaccacttcggaggagcgttcgtccggtggcttgatcggttctgtgggtgtggtaactaccgacaacggcaagatcagtatcggcgatttccgttcgaatggtgaatatattccatatggtgctggtgatcctacggaagacgagcagcgcatcttccagcagtggggaccattgaacatgtcattcgatgtgcgagatttggccgtttaccctgatacttcacgcagtgccgaaggtatgcgcgcgatttggcagcgcacgccgtgggggagcaatactcagctggacggcgtgctcatggttgatcctgtatttttgcaggaacttacgaaaatcagtggtaatgtcactattcctgatggaacggtgcttacgggagataacactgctgagtttttgttgaacaaggtgtatgtcgattacccagtctccatgcaggacgccctatttgctcaagttgcagaacaaacagtcggtagtatgttcagcaatgttgatttggctaaactcaccaaggtcgcacagcttatgggtagcatggccgaaggccgtcacttctccatgtacgcattcgacgaaactgctgaaaagaccattagtgatgcaggctttactgcacagactccgagcagtgaagagcatccgcaggtgggagtgtatgtgactgagcagaatccgtcaaagatgggatggtatattcatcgtacttcgaaggtaactcgttccacctgtgataatgatggttcccagacctatcatgtggaatacacgatgacgaatacactggagagcagtcagattggtgctctaacgagctatattcttggatccggcggacaaggtgtggaaaaaactctgatttatgcgcctgccgggggctccatctcaaatcttaagaccagtggtggttcagtgacggagagccgtcaagaaacattgaatggtaaaaccgtgtatgcgagcaatgccacgatagctcctggagagtccgtcacctattccttcgacgtgaccacgtccaccaaggctgcctccgacctcactatcgaccaaactccaatgggctggattgattccggtgttaccaccgatactgctgcctgctccatcaacaagcagtaaaaagagctccctctgacaagggagctgtcagccacaaacggctgcctgaggagagagaccaaaaacaagagggcgtcagcaaaaagctgacgccctctacattgcgaaaactgcataccagtcccattaaataccgcgcccactgtcttcagcagaatcgcaatatcccccgtgatagaccaattctgaatatatgacacatctgcatattcagactgttcctgagacaaatcattacgcccggaaatctgccaagggccggtgatacccggcttgaccagtaggcgagtggaatacagtggcgagtactggtcaacctcatattgacgttgcggacgcggccccaccatagacatatcgcccttcagcacattgaagaactgaggaacctcgtcaatggaagtcttgcggatgaacttaccaattttagtaacacgaggatcgtccttgaccttgaatgttgttcccagtttcacgccagctgcggcagccacttcggcatccatcttatcggcgttcagccgcatggaacggaatttgtacatagtgaaaggcttgccgtagatgccgatacgagtctgtgagtagaacacggggccaccgtcttctcgcttaaccttatatgcagcccatagcatgatgggcgaactcagaatgattgccaccagggagagaacgatatcgcacacacgcttaaagatgcgagtcggcagagaatactgtgcaagtcgggctgtcaaaatcggcatagaggggtcattgtgtagctgcaggtttgcgccgctcagatctgcaacggatgcagtaagagccagctcgatgcccatagattcaacagcgagcgaaagagtacgcatggtttcagaatcacgcgtcagcacatcagcgatcagaatagtgcgaaccttcatccgcttggaggtctgaggcaaatgggagttcaacgccatcaccttgagtcgcgcttcttcatcattggcaggaataaacggaaccgatataagatgttgagcagcattcgggtcatccgaatcacacacagaggcaacagggcagaccgcgatgggtgcataccccaggctgaggcatgccttgagctgcttcagcgttttactgatgccctccggagagccaatgataatagtggggtagttgaactcaccttttgctcgattgcggtgaagcgcacgacgcatcagccaccgttcaacgataacgaggatgagagaaaggataggaataaatacattcagggaacgcggcacattcagatggaacaagtagcccaatgtacagagcataatgaagtcgataaaggccgcattaagcagcttggcatatagtccgtatccctcgcccatagtgtggcgttcgtagcttcgagctgcgtagaggctgatgagccaggagatgcaggccaagctcaggaaactgaatacaccataatcggatggtcccatgttctgcacattggcatatgctcctggattgcacgcgaatacgatgcaggtggcgatgatggtcatcagcagatccagaatcaccatggtcgtattgtacagataacgccatttgggcactgaatattcggtgagatgaggcctatcgccagcatcgttatgagtaacggtgccatccggagaagacgagaagtaagtgccgtcaaaaaatgttggtgcagccgtatcaggagttgcgtccgcaatgtgagaatccatatgtgctgcctgagcacgactgatttgcactcggtgcagtgtctcagtctctgctgtggtgttgttcatatgttgagccgttgctgatgccgtggtgctgactcttgacatggtatgtgaacttcttccccttaaggcatttcctgaaactgcaaggaaatcatgttaatttcatctctgttgcacaccctaccatgagtccgcccccccccctatagcaaaattgctcaaaaaaacgaatttcccattagcattctgtgaagatgaagtgatggtggacggacgcggattggtcacagtccgatgtatcggactagaatggtgcgctagtggtttgtatgcaggcccgcaaggtagcgttgtaagtatgaagaaggactgagcccatgcacattatgttcgtctgcaccggcaatatttgtcgttctcctatgggtgagctattgctcactcgctacctctctggcaccacggtgcagatttccagcgcgggtacgcatggtttgcccatgcatcagattgatcccaacagcgccctgcttatggaaagcgtaggaatcgaaccgagtgggttccgttctcggcgcctgacacagccgatggcaaagtccgctgatctgatcctgtgctttgaaaaggatcagcgtaaagacatcgtcacgttggctcccactgctgtgaaatacacgttcctgctgggcgactttgcgaacatgtgtgagtactgcgcgcgcaatggactggtcaagggcttgaccattcaggaacgcttgcagtcagtgatcaactccgcgtccattattcggccaatgcttcctgagcctgaggatattgaagatccgcacggcaaggaatacgcaaagtttcgtaccgcagcagagcagacgaacaaagcgctgcgcaccatcctgaccagcatgcgtaagcactaccgcgttgaggaagccccggtacggtctcaaattacgcgtcagcgagctcgtcgatccacgccatgagcagctccttgcttttcggataccccagcatctgcatggtgcggcttgatatgaactgatttttgttccgcatttcctctgactcgatgggagatgatggaaccatggcaaagggcactcgatatacgccggagttcaaggcgaaggcggtcagactgctggcggaatcgcgttcctcgtattcgtcggagacgaacgcgatctccgcggtggcgaaggatccggggatagcgccggaatcactgcggcgttggcgcaaccagtcggacgcgacggtcgcggaggagacgaggcagtaggccgaggacgcgatggcggagctgaggaggctgcgggccgggaacgcggaattgcgtcgggcgaacgagattttgacgacggcgtcggcttttttcgcggccgggctcgacccgacacggcgttgatggccgcgtacatcgacgagcataaaagccgtttcaaggtcgggccgatccgcagggtcctttccgaatcgttggactgcgggtttctcacgccgcgcggctgccgcatgttcgaaacacgtcccgtcagccgcatgcgggcggggcatggggcgctggcccgcgacatcctccagatccactcggatttcttcatggccgtgtacggttacgggaagatgcgcgcgcagctggtcgcccagggctgggatccggccgaggtcggccgcgaccaggtgatgaacatcatgcgcgagcttggcatccggggcgtgcgccgcggcaaaaccccggtggcgacgaaacccgccaagggcacgggcggcaggccggatctggtggacagggaggttcgaggcttgtgcgccgaaccggctgcacgtggccgacatcgcctacgtgcgcatggccaacggctcgttcggctacacggcgttcgccgccgacgtgtacgcccgtcggatcgtgggatgggcgtgcgctatgaccatgaacacgcaggagctgccgttgcaggcgttggagcaggcgatctcatgggccgcgtcccgcggcggcacggatggtcttatccaccacagcgaccatggcgcgcagtacaccggcacggtgtacaccaccagggttatggaatatgggatgctgccgtcgaccggcacggtcggcgactcgtacgacaacgccatggccgaaagcgccgacggctcgtacaagaccgagctggtatggcggcgcaaacccttcgcggatctgaaggacctggaattggcgacgttccggtgggtctcgtggtggaactcgaagcggctccaccagtccctgggctacaggacacccgaagcggtggaaaccgagtatcatgcaaaccaagcggcacaagccgcctcactataagggcggaacaaaaatcaggccacttcaataagatgataaaagggattgtagaatggagagaagacgtgacggatggaattgaccagcctgatgtatctggtgtcgataaacattgtgacgaaaaaaactcagaccgtgagccgattcgtgtagcccagattgtcggtaaaatgcttggtggcggagttgaagccgtagtgatgaattattatcgtcacattgaccgcagcaaagtgcaatttgactttttagttgatgaagattccactcgtgtcccagaggatgaaatcactgctttgggtggccgaatattccgcataccaccctaccagcatccaatccgctaccgtcgtgcgctgattcgcctgatgcgcgaacagcggtggccgattgtgcacagcaatatcaatacgttgagcgtgttcccgctatcggcggcaaagaaggttggagtgccggtgcgtatcgcgcattctcattcgactatgggcaaaggcgaattcgcaaaaaacgcgatgaaacttgtgttgcgtccgttcgccaatgtgtatccaacggttcgttttgcatgcagtcgttatgcaggaaaatggttattcggcaaaaatgcggattttaccgtgattcccaatgctatcgaattggataaattccgttttaatgctgaaacgcgtaaacaaacacgtaaagagctcggcattccggatgatacgttcctgattggtcatgttggacgtttcatgccacagaagaatcagacgtttctggttgatgtgcttgcggggctgcttcctagacgccctgacgccatgctcgccttcgtcggtgatggtcctgacaggactgcggttcaacaacatgttgaagaacttggtatcgctgatcatgtgctgttcctcggtcaacgctcggatgtcaattgtctataccaagcatttgacgtgttctgcctgcctagtctatatgagggacttggcttagttggcgttgaggcgcagcgcgctggtcttctatgcctgttctccgacgcaattccacgagaagttgatgtaacaggtgcgtctagattcatgcctatagcatcgcctgaagaatgggtctcgtttatatcggcaattgaatcggggacgcgtatcagttcctctgaaaaagtgttctctgactatgatatttctgagaacgctcaaaagctaacttcaatgtacttaaaactttttgagaagaaatgaaaagcagtatggatccgctagtttcagttgtcatacctgtatataacgttgagccttatctacatgaatgtgtagcgagtgtggtcgaacagacttacacgaatattgaaattattctcgtagatgatggttcgactgatagctcaggaacgttatgtgatgaatttgccttgtcggattcaagaatatgtgttttccataagaaaaatggtggattgtctgacgctcggaattatggcattctccgctctcatggaagtttgatttcctttattgacagtgatgattatgtatcccccgattacataatgcatctgtatcaggcattagtcagggggaaaacggatattgcagctacctctatttgtattttccgtgagggggagcttcctaaggagcataagcgcgatacggcagactttcatgtatatgatgcgtgcgaggctcttgaagatatgctttatatgaggcatttggagcctaacgcatttctaaaaatatataagagagaattgttcgacactattcagtatcctgtcgggaaattgtatgaggatattgctaccactaccaagcttattgataaggctgggcgaatcgcgtatttggatgagaaggactattattataggattcgtccgaatagcatccaaacagcgagttttaatcctaaaaagcttgacttgcttgatcagcttaacgttgttaagtcgatagtacagacaaaatatccgagtgccattaacgcttacttttcaaaagaacagagtgcattgtttaatttgtatatgaatataagtcctgacgatacaaaagaaatgcttgaaatagcagatggattgtggaatggaatcagaaaaaacagaatttcagttttaagggacggggaagcgaggcctgatgctagaatcgcttcattgttatctttttctggaccttcattgtgtagatgcatatatagattggttcgaaagtgatgtcgtgattgatatgaatgatgtgagtttactttttgctaaggtactcaaacgagttccgagattaaatcgctttgcatgtaaatataatatgtacaggcatgagaagctcatgcaacgtattgaggaagttgcgttacaagcatctgagctttcctcagttgcgggggaaggctccgcaaattatggtccgatatgggtattttggtggcaaggcgttgataatgcgccgttaagagtgaaagcgtgcatttcttcaattcgctgcaattcgaatggacgtcaagttattgtaattactcagtccaatgtacgcgaatataccaacttgcctgactatattttcagcaagttagctgatgggaatatcacgctgactcatttttcagatattcttcgtttcaatcttttgcacttgcatggcggaatatggatggacgctactttatatgtggtaaggccattgacttcaacccgatattcgggttctttcttcacttgtagtggatatcctgatccgacttttttcaatgttgctgatggcaagtggacaggcttctttatcggtggatgcgagaatgagtttttatttgcatttatgaatcagtttttcttagcttattggaagaacaatgaccaacttattgattatttcttaatcgattatgcgttgaaatatgcttatgaccatgagattggttcattgcgatcttggtgtgagaatgaacggggtcaggataaccccgcgctttttgatcttgctcctatcgtaagtgaaccatttgatgagaagaaatggtccgaactgacggaaaggacggacgtttttaaattgtcttggaagaagccaacctcgtatccggaaggttcgttcggaaaccgactcgtcaaggaaatgtttttcaacaatacggaagggaacatatcatgagacgacttggcatagtgattcccgcatacaacgtggcgttcccgttgaagaggctgctcaaacaggtcgggaaacagctcacggatgacgttgccgttgtggtagtggacgacggttccgccgacgacacgttgcaggtcgcgaaacagttcgaatccgaagcagtcagggttcttcataaggagaacggcggagtgggttcggcgcgcaacctcggcatagaggaatgcgactcggaatacatctggttcgttgacgcggatgacggaatcgcgcctaacgccatcgccaccctgctgaaggccatcgggaaaagctcgagagactgttacctgttcggctttgacaagctccggggcaagtccgcggagaccatcgtcaacagtgaggcgaaaagctacgatacgtcccgtgagatggctgggaatttcgatcgtctgttcggcgagaatctgctgaatcctttgtggaacaagctgttccgcaaggagatcatcgaacgtgaggacctccggttctcttccatcccctccggtgaggacgctgagttcgtgctccggttcctttcgcacgcgcaaagcatggatgtgctgaccgacgtgctgtaccgttataggttgctttcggatacgtcttccgcgcacaaatcgcatccggactacatcggcgaccacaggcagatgttcaaggccctgacggattactgcagcacgacgggctcgtcggccactgcggtcaaggcgcgctgggcgacggaaaccgcaatgggattccgctggaacgtgttcaacggtctcgaaggcaaggggaagtaccgccaattctccaaggaagtgaaactccgccagccggagatggaggcattgatcgcatccctgggtgattgtccgaggcaaggcgggttgcgtggtctggtcgcgcgttcgattccgctctcgtacctgttcatcaagacgcgtctttgcgttgccaacattcagggaagtgcagggttttgtgaataaccctagagtccttcccgaggccctcggagcgaacccaatttgtagtgactattccgtaggtatgaatgccatcgtcgtgcattccttcgagcttgggaatgctccagttggtatatccgacagaacaatctaggaggtaatagattgatttatgcaatcgtttttatattgtctctattgttcgcctttagtgctgagcaatttcagaccggaaaaaaaatctttttctgcttttttgccttttgttcagtgttggcgttatctatcttgaacggcattagggactattcaatcgggacggatattggtgtctacggcaaaaaagtgtttgtcgacgcatcgcagtctcattcattcacggaatatatgcgtcaatgcaaacgaattggcatgacggaatatgggtatgcaatcctgaactatatagttgggtttttcacaagcaatccacatgttttcttttttgtgctagggctccttgttaatggcattttctttggatgctgtgtaaaactatgtaatactgcaagcttgacattcacttgggctacttatttattgatcttctacccgacaactttgaatcttcttagacaatcagttgcgctttcgattatttttatcgccattcttgaaatgttagaaaaacatcttctggaatcactgatatggattgttatcgcctattcgttccatcattcggctataataggattatggccacttgtttttgtctatttatttaacaaaataaaaaaagaatcaaagaaaaatactataattattgtttttatagctatatccgcacttattcctaccgttattcttaaactgaattcgtttggcctgttagatgataaatacagtcaatatgttagccgcggggatggttctggcagtatgaccaatgcggtcctcgtccgtttacctttcattattctttcattgttctacttggtgcaagatagaaagaaaaataacgatgaaaacaaaattttgtggacgcttgttttggctgaaagcgcacttcttccattgcaattaatttcgccaagcctatttcgaatagctctatatttaggtatttttaaaatacctggctatgcatcgctaatcaagcattgccgtttttccaaatctctattgtattcggtttatgcggcctacttgttgttctatttcatgtatatgaccgttatcggtgggtcgaaccaaatctatcctttcgtcgtcgccaacgacctcttctaagaaaggaccagaatgagacacgcatttcttattgtagcccatactaactggaaccaattgaaaactttgattacattgttggatgattcccgcagctccatatacgtgcatgtggatgcgaaatcaaaagattttgatcctgcttttttcgaggggtcagtcaagcgcggaacgttacatttcgtacatcgcgttccggtggcctggggggcgattccctaatcaaatcggagataatactgctggaagaggcactgaagagtaatagcgattattatcatcttatttccggattcgatttacccttgcatgacatggactatatagatgatttctttattaaacataaaggtaaagagttcatccatttcagtgaactcggtgaaacaatgactccacgcactcggtagagaatttctatatatcatccgtttcagaatatgttggggaggcgatgcaaatggactgaaaggattctcaatcgagttgagccagctctcggaatcaatcgtctgaggaggtttccttcttcagtattgggcaaaggagcgcaatggttcagcatcactgataatctcgccagatatgtcgtgaacaactggtcttggtgtaaacagatattcgctcactctttctgctcggatgaaatgtttttgcaaactatgattctaaattcgtcttatcgagagaatatataccatcctcaggctgatgatgattatagggctataatgcgtctcattcaatggaatcaaggagatctgacaacttttcgcacaaaagcctaccaagaattaatatattcgccgatgctatttgctcggaaatttaatgagaacatttatatataaataattaatctaattgctgagcgtatacgtggttaatctttttcttatcaatgaaaactaagatgtagaaagaaataaatttgcaagttcattctgtgaaattcaatgcaatgatgaacatggttctaactgtgtccaatatgtttataggcatcatcacgattccgtatgtgacacgagtgctttcagttgagggatacggaaatgtaagctttgcgcagaacctatcaacttggttgtcgactatatgtttggtgggtatacctgcttatggagtcagagaatgcgctaaggtgcgtgatgatcaacgtgctttagcgagtcttgtgcgtgagctacttattttcatcactatttttacgattattgttttaagtatctttgctatatgtatctgtaccattccacgattcaaggaactggctcctttaatgtggatgttccttgtcagtacattattgcaatcctatggcgttgaatggtattaccaagctatcgaacaatatcagtacataacgattcgtagcgtagtattcaaactagtatcgcttatttcaatatttctgtttgttcgtcatacagacgattggcttatctacggtgcaatttttgcttttatagtatgcggcaacaatgtgcttaatctgttacgtctatttagaacattgcatttttgtcaacttgctccgatttgcttgcgtcatcatataaaaccgctttgttcctttgcggtaatgacagttgcttcttcaacgtatattgccttcgatagcgttctgttgggaatgcttaatgacagtaatgtccaagttgcgttctaccagcttgccgccaaactcaagaatatttgttggcagattgttaatgctattgtgggagtgcttatcccgcggttagcttattatgtgaaaaaagagcctggaaagtataggattctactaaaacgaggatatgatttcactctaaatatttgtttgggcattatgttctttcttcttatatatgcgcagccgattgtagttatattctcctcatctaaatatctcgacgcaagtttgcccgtgcgaattatcggtgtagtcaatttttgttcttgcatgagttacttttttggtttatgtattcttacgccgttgggacgtgaaaataaatatgctactgccaatcttattggtgtgcctattagctttattttgaatatattacttgataatcgttttggagctgtgggcgcttcgattgccattcttattgcggaaggcgccatcttcatccgacagatagaagacagccgtgatattttaacatcgattgtttcattaaaggatacattacggactcttattagtcatatagttgcttttaccgttgcttttattattttgattcttctcccatattcaggtgttaatggttatactgccggtggagcatttatcgttcttgtttccggctttgccgggtacattctcacgtggttgattattgcacttctcctgcatgaagatactgcgtattggatttttgacactctttcgtgtgttattcgaaaattaaagagatagagttctgaataagggcgaaacattttgtcttggtctgaaagtgttagaagtctttaactcaaaaaggtgttgcactcatgagccaacaatattcgcgcctactctccgaggagagggataggtgctgtggacgttttcttggagacagtcgcgcaatagttccttggttttgacggtattgtaccggactcatccggccgggtagggggggctgcggacattttcttggagactggacgaaaggattttcgtatgtccggtcccgaggaacgcaagcgggcggtggaactctatctcacgacatcaacgaccaccgccgaagcggtcgaacgtctcggtcatccgaccaggcagtgcctggaacgctggctggcgaaggatccccgttacgctggacgtatgaggagccccatcatccccatggaaaccaggcagaaggcgatcgaaccagtattgggcggcatgcggcaggggcaagccgcccggcggctcggcgcgggcgtgggcgccgtggcccattgggccaatggcgtatcgcgaggaacgcctgcaacggcagctcctcggtgtccatgctggtggcgcacgcccagccgacgatgcggcgggcgaacgtgtcggtgacgaacgccgtgtagccgaagcgtccgcccgccatgcgcacgtaggtggtgtcggcgacatgcagccggttcggtgccgacgccttgaacttcctttccaccagatccggtcgtccgcccgtgcccttcgccggtttcgtcgtcaccggcgtcctgccgcgtctgacgccctgaacgccgagctcgcgcatgacgttctcatcacctggtcgcttccgatttcggccggatcccggccctgggcgatcagctgggcatgcatcttcctgtatccgtacacggccatgaaaaaatccgagtggatctcgaggatgtcgcgcgccagcgcctcatggcgcgccctcatgcggctgacgggacgcgctttgaacatgcggcagccgcgcggcgtaatgaatccgcagtccagagatccggccgacgccccgcagatcgggacgtcggcgacgccgaggccctgcgccgtcggatcgagctgggcctataggaactttgtggtgctttaggtctggttctcggcgtcagtcggtgccgttgggatatcgcgtgccggtgtggaattcgttccagccgacgccgatcccgtatgcgggcgagacgtcgccttccagttcgggcgacgtcgctttcccgtcctccagcggatcgtcggaaatgaacgattccggccgccctggccaaggccggggaagtcgccaggcagatggaaggcaggaggctgagggccgcggcgagctgcctgcgggaggggaacggcgagacgatgacctgcctgctgcccgagtatcccgcggggcaccgcaggaggatccacacgaacaacatgatcgaacggctcaaccgggagatcaggcggcgcactgtttatgttcaatggttttaagaccggttgagcgtttggtttttagtccgaaagagcggtaggaattagtccatttcatcgttgatgggaaacaagtgacaccggtctgtcgttatcgattagtttcccgagttgaaaaaacaaccattgacggttctcgggaaaggaaaggaatgaccataccggtgtcggttcaacaacgtatcaggctccttgaccagcagggaacgccatggcgagccatcgcccgtgatttgaacgtgtccagggacacggtcaggaaatacgccttgatggaggattgctcgcccaaacccaaaccatcgaccacgcggccgaggaaactcgacgggttcacgcccgtgatcgacgagtggttgcaagcggaccggttcatgccccgcaagcagcgccataccgccaaacgcgtgtacgacagactcgtcacggagaaagggttcaccggctcgtattccgcggtgcagcgttacgtgaagcaatggcgtcaagaacatcgtcccgcctgtgacgggttcatggagctggaatggcggcccggggtcatgcaggtcgatttcggcgaggccgtggtggtgctggcgggcgtgaaaaccaaggtgcattgcctggtggcgtcgtttccgtattcgaacaagcgttacgtggtcgcgttgcctggcgagaacgcgcaatgcgtgtgcgagggattggtcgagatcttcgagcatatcggcctggttccgatggtgttggtgatggataacgccacaggggccgcgcaccggaccgcttgggacacgatcacgatcgtcgggctcttccagttgttcctggagcattaccggatcgaggccaggttctgcaatcccaggagcggttgggagaaaggcagcgtggagaacgcggtcgggttcctgcgccgcaacctcatggtcccgttgttgaacgtcgagtcctatgcgcagttaagcaagcatctgctgtcgcggtgtgacgaactcggcaacgacaagcattaccgggctgatgaaagcgtgaacgacttgttcgaagaggaccgggcgggcatgcggccattgccgcgcgtgcgcttcgacgcggtcgattggcaggaacggcgcgccgacaaggaaggtgtcatacaggtcggttcgtatcgttacctcgcgggcccggcctggcgtagctggccgctattggtgggattgcgcgcgttcgacgtggagatccgtacccgcgacggccgcaaggtggcctcgctgcccagggcttatggcgagcaggccggtacggtgcgtagcccgtcgtcgctgctgccggcattggcgcgcaagccacgcgcgtggggcgaatcacccgtgcgcggtgattttcccgagggcctgagaaccctgatcgacgcgcaggactccgcccggcgcaaggccacgttccgcttgttggagcgcgtgggtgccgcttgcggtttcgacgcggcctgcaaagccgcggaacacatcatcggccagggcagaccgatcgacgaggcagccctgagcatcatggccagacggatagcgtccggcgaggcgccggccgatgttcccgcgcccgacctgagcgtgtacgacgacttcatgaaaacaggcgatggcgatacgctcaaggagcgggaaggagggaaggaccgatgagccggatccagaaccccgcgccggacgccacccgacgccgcgcgtccacgaacaggaaaatggaaacgatcatgcgattggcgcgccgactgccgttgaccaggcaagtgctcgccgaccagctcgaaaccgcgaccccgtcgcaaatggagttcatggaccaatggatgaacgcggagatcgagtccagggaacgatcgaaacgatcccggctgctcaagcaggccggtttcccggccgtcaagacattggacggctatgactgggagaacattcgttttccggtggattggggcaggcggtcgcttgaatcattggagttcgcgagccgtccggaggatgtggtcatgttcggacctcccggcacgggcaaaacccatctggcgatggcgttgggaaggaaggcctgcctggaaggcatgacggtacggttcttcaccgccgctggcctggtcatgcgcttgttgcacgccagcacggaaggcaaactcgacagggaaatcgcgtccatcggcaaggcccgcctgttgatcatcgacgagttgggctacgtgccgatcgacgaggaaggcagccggttgttgttccaggtcatcaccaacgcgtacgagatgcaatccatcgtttacaccacgaacatcgagtccggcggatggggacgcgtgttcggggatccgaacatggccgcggcgatcatcgaccggaccgtgcatcacggcaggatgctcaggttcgagggcgagtcctatcgcaggactcatgctcttatgcaatgaaacaataaaacacgagcaatgacaggccagttccgaactggactaaaacctaccgctttttcggaaggaaaactcacgccacactggcctataacaacttgacgttgataatggttatgccggtttctgatcggtgataatggtggatgacggcttgggcggtgaccccacatttgactgacgccatcggttccggtggctgtccttattttgatttgtcccgcccctggccgccgacccgtgggccatggatgcatgacctcataggagcgtgtccgctcccgtcggatcccgcaagaaccatggtagcgtgccccgtcaacgtcctgtctgcgccgcaagcccccgggaggcatccgaacacatggaaaggaacgacgacgatgacgccgccgaacgaagtggtgtgggccgggatcgacacccacacggacacgcacaccatcgcattgctcgacgagcggggcaggccgctgggcgccgagacgttcacggcggacccggacggatacgacaggctgatcggcatgctgcccgggccgggcagggtcgcggccgtgggcgtggagggcacgaactcgttcggagcggccctggcccgtcgtctcactgccgccggatacgaggtgcgcgaggtgctgcgccccaggcgaagcgtgcgccgcagggacggcaagtccgatcccctcgacgcggtcgccgccgcccgtagcgtcatggccggcgacggcacgagcctgccgaaaagctcggacggctgggtcgaggcactgcgccacctcaacgcgcagcgatcccaactggtgtcggcgatgaccgcgatctccaattcgacgaacgggctgctcgtcaccgccccggaacccatcagggaacgttaccgggggttgaggagcgagacccgcatgaacaggctcgccgaatgcagaccggccggcggcctggtcgagcatagcgtgctggccgcgctgaaatccgccgccaaggcatggaaggcgctcaaacgacaggccggtctcctggaggaacgcatgcgcctgatcctcgaggaacacgccaggccgctgctcgacatgtactgcgcgggcaccgtcatcgccgcgaccctggccatcgtcgccggggacaaccccgaacgcatccgaagcgaggccgcattcgccaaactctgcggcgtctgccccatccccgcgtccagcggcaggaccaaccgacacaggctcaacaaaggcggcaaccggcagggcaacatggcattgcaccgcatcgccatcgtccgcctgcgataccacaagccgacccgcgactacatggccaaaaagacccgcgagggcaaaggcaagctcgagatcatccgctgcgtcaaacggttcatcgcccgcgaggcataccgggcgctcatcagcatacgcaacggcgaggtcggacgcgggaccccggccgaacgcggcgccaagctgcgcgaactacgcgtcagccggaacatcacccagcaacagatcggcgaggcgctctgcgtgccctcgagccgcatcagcgagatcgaacgcggcgcacgcgaccttcccgaactcgagcaacgggccatccaatggatccactccatcaccgacccaaaacaacacacccaaacgcttgacaatgtataggagcatcaaaacacagcgcacgcgcgtggtcggcagcttccccgacggcaacagcgccctcatgctcgtctgcgcgcgcatcaggtacgtcaccgcgaacggatgatctacctgccgctacctggacatgtcccggctcgatgacaacctcgtgggagcgaactgatcaccgcgccatggacgggcgagatcacgtttgcacatactttcgggcactaccccttttgaggggaatgtcggaaagaggcggagagacgaaagggaaacaattatggcattaaaggacacggcttctcataagattggacgggccagcagccgacggattcaaaatgggggggggagcgtaattccagtatcgagcttcttcgcctgctgtcgatgctgatgatcgtcagctttcatttatgcgtgggcaacagatacgattggttcctcgcccagccgccaacccccacgaaggtcgcctaccagttcctcatgggaggcggatgggtcgggaacttcatcttcttcaccatctccatctggttcctgctggaccgccagaacaccctcaaaagcagtctcaaacgtatttggattctcgaacgcgaactgcttttctggagtctcgccttattcgccgcgaccctgttcctccgcaaggcgggattgtattcggggagcgtgctgaaactcgcggcgcatagcgtgttgccgttgacgacgtcgctgtggtggtatccgaccagctacgccatgttcctgcttctcctcccgttcctcgtgaccggcatgaaggcgttgggcgagcgcgcgcatcgcagtctcgccctaatcgccctgctcatgtggggcatcgcgggcctgttgccgtttacccgcaacgatctgcacgggggttccgtgcttgtgttcgtgtactggtttgttctgctttcgtactaccgctggtgcatggagcgaataagcgccgcgacctgttggaagcttattctcgccggcttgggtatagaggttgtgtactgcctggctttttcgcttgtcttcgccatgaccggaaagggcgcgggtttccagttcttcattttcgataattggaagatcccgtccatgtttatcggattcgggcttttcgaactgttcgcgcgcagggaattccatagtcgttgcgttaattgtctggccgggtccgctttcggtgtttacctggttcactatcatccggcggtcaaggctctttggatgaactggcttccgctcgacaaactgtacctgtcggcgcatccgctcgcggccatgacggtatgcgtattggccattttcgcctgctgtctggcgttggaccttgtacgccagggcctgttcgccatgaccgtcgaccgcaaccgcggccgctggttcgaactggtctggaacaaatccacggaacgaaccaaacccatgccagtacacaccgtgccagcacatacggaaaaatgaacacggcaggtcgtgtcaagatgttcccgtacggcagtttctaagaagactttgcctaagaacatcgatgttccgtggactcaaattaggtgagatcacaaaaccctaccatctcgctgagcactgtaaaaatcgcgaccttggtgtcgacgttaacgttatgcagccttttcaaatatacgtttctgtatttttgaataattctgcagattcgtgatgaaatcgtctgttctatggcattcttgctcggtgagagcaatttggttattgttggctaaattgattgtgtaatcatggatcttctctataagaagatccatatcttctactgaaattccgattttatatgtatcataatctttatgagactttaaatcatctagtgcagttataagattttctatagtttggatatccagattcccgacatgaatctcatcgaggtatgcttgcagtgcatttttaaatttcaccacagcagctgattcgtggtttttgaccttgtagtagacgattccaccaactgttatcacacctaaaatcgcaccgccaacatacaaaactggtttgttacgtttcgcataattcatgatttgggcaccaacgctttgtacctgttttgttgtttttgaatcaacgggttttagaagctttacgatttgcccattacggactccggatgcatatctgacgactccgccgattctgcggtattctcctgttgccaatttagccataatatctgtcgggacatcgaatgcttcttgtacgactaccattattgataatcccttccgaagaactggttaatttcatgtctacgagttgattcaatcaacgtcgatcaatccgatgactattatatcttctaagctttaatttaaagtgtgggaaaggaaacggttttgataacgttcgaacccttgctgatcttaggttttcggtcctgtcatgaaaggcgtggcccgtgtcctgtgtacgttttattcgcgaaaacgaaaccacagtcggaaaccaagagccggaacgtgcccagcctatggatgacgcgatgcgtcacgccgtttatcagcagctttgctttccttacctgtatgaaaggttcgtgaaaagaatggccgaaccacactatagaccaagatgccaacgcactcctcactccctcgcaatccagttgaacttcgtttcgatgcccatacgtttcagctgcttctttaccgatgagagagcaactttactgaaaaatgggaggttgcgattgtctttcttctgaatgacaccaaaaacgacttcgcgaactggattgttctccacaaggaaaccatctatttcgtcctgtgctagatgcccctgttcaccaaccttttggattttgccatcaactttctcagcaaaatcagtgccgtctttttcaatacttgccgacacaagaccttgattaaacaaatgactcattaccgaagagccggaatattgcttcacgtgaatacgctgaccggaatcagaaagaacatcacaaaactcgatacggctcgccccgccgccataggaaattaactgacgatccattagtatgaaatggttatcatctttgttaagttgtcttgtaagctcgtaattatatcttccttcattctcgagattgatttctttgccatctcgttctttatagtcgctggaattgcggtaatcttctttgaacggaatgaaagaagtcttggcctcttcaatactttcaatatcctcattgattcgctcgaggtattcccgctgaatctcataccatttgccatcacatatgcagtacgctttatcgttatagttcagttcacccataagacattcactcgacgaccaggttcgcaagatacagccgtcaattcttgaaatcgcctttatctttttactcttcaacttctctagcgaatctggcttcttcttaaacgaacggatgacgtcaccaagcaaaatatcattatgaaggcgcggctctccatgaggatctttctcattcccaatctggaatccctcaatatcatcccaatttatgacatcaggcactgccatccataaattattattggtgtcagcatactcagaaaaatgagaaatttgatgaagcgcctcgttccacaaggcattaataagttcagtgtcctttacgcttgcaatacggtcaatccaatcaaataattgcttataggtgtccttccgatacaccttatatagctcgcgaagaaaggcctccgcgttttcaagattgacttccttcgtaacggacagagagtcccttcccgtcatcatcccactcaaaaaggtgccatcctcacctttggcggtaacctgccccagcaaattacaatccgcatcgaaagcaaaatcgtcaattccgcccgctttgggcagctgttcgctggaccgtttcgcactgcctgaaacgtcggcaaacctgaccgccctcagtgtattaggctctacagtgttaagaatgcatttcagcccaaaacgttcctcgacagaagatcgattgatcagtgcgcgtccgtaaccgaatgttagggcaaaatatcgcacattctgttccatgccattcgaagagccatcatcgaattcctcatcaccaatctcattgcactcgagcaaaaccggtatgacgagtacgaggctaacattttccacactcagacactctccgtctactgatgagccaaagaaagactcaacccaagtaggtttatgctcccctcgcgttcttaccagcagcctatagtcatcatgaccttcgaccggcaacgtcattattcccttgtcttcatccggttcgacggtaatcttttccggcggaatgtcttgcttaattaaatagatgctgagcttgttcttagtcatctcattcctcaatcaacgatttggctgctcggtttttacgccggatcccgcatatatgctacagccatccgacaaccccacgaatagattaccttatgtttgactggaatcaccaaccctattaagaggcaattccaaaaccataggaatgggtgcgctccgtcatcatttgcttaagggttatgcctacactgctttgcctatgcatggcttgtccaatccattccgttgctttatcccagaccagttcgaaccagcggctacggtagtggctggcagctggcttgaatgaactgcaccccaaaacttggactgattaaattagatattactccgtcagagaccgattccggaactcctccggggccagcccattcaaagcgacctgtcttcgcctcgtgttccagtggacgacgtacccatccagattccgtttgaacgagtcgaagtcgggccagaaccgcttcctgaagaactcgtccttgagatgtccgaagacctgctccgtcgcgccgttgtcgaggcagttgtccttcctcgactggattggtaacagtgtgttggacagtttcttagaggacgagtccttgttcggtgaattccttcgggctccggtatccgggggtggagtggagccgctggttgccggaccaccacacgtagtcgttgaggtcatgcctcggctgctcgatcgtggtgtagtggttccggtacacgagctccttcttcagcagcctgttcgtcgactcgaccacggcgttgtcgtagggtctgcccttgcgtgacaacgatcttttgatgtcgaacacgtcgagcggctcgtcgatccccgtgttgtcgaactcgctgccccggtcggtgtggaacacctggacgtccgtcagcgggaagtcgagggtggcgaacgcggccagcaccaggcccgcatcccgggtccgcccggcggaatggccggcgatgcccctgttcaccaggtcgaccagcaggcacacgtacgcccagctgtgtgtgatcgaataaaggtgttcactgtcggcacttgttcctgaacaccctgagcgttcaatttggacggtgtcggcggtgatggcgccggtggaatgggaataccggcatcgtctggttccttggtggattcccgagtgcctgtcaaccaaactgatggttcccgggaggaaaggaaatgacgacaccggtgtgtgtccgacggcgtatcaggcagctcgaccgccagggcctgagccacagggagatatcgcggaaactcggcgtatcgcgcacgaccgtggccaggtacgccgaccacggggattactctcccaagccccttggctcggggcatgcgggcaggtcgctggtcgacgcggggtattcggccgtcgtggacgggtggccggccgcggatctgcgcatgcccgtcaagcagcgccacaccgcgacgcgcgtgtacgagcggctcgtggcggagtgcgggttcacgggctcgtattcgtcggtgcagcgctgggtcaggcgctggcggcgggagcatcgcatggagtcggacggcttcgccgagttggagtgggcgccgggcagcatgcaggtcgatttcggccaggccggggccgtgatcgccggagtcgaacgcgtggcgcgtttcctggtggtgtcgttcccgtattcgaacatgcgccgggtggtcgcccttcccggcgagaccgcggaatgcgtgtgccagggactgctggaggtgttcgagaggacgggcatgacgcccggggtggtggtgttcaacaacgccaccggcgtgggccatcgcaggccggacggcacggccgcccggacccgcttgttctccctgttctgcgcgcattacgggttcgggccgcggttccgcgacccgtgttccggccatgagaagggcagtgtggagaacgcggtcggcttcgtcaggcgcaacctgatggtgccgatgccgtcggccgagagcttccaaacgctgacgcgcgtatggcttgacgagtgcgaacgcgtcgccggatcggatcactaccggcatgatgttccggtgatcgaactgttcgaggcggagaaggaccacatgcttccattgcccggcgtgcggttcgacccgtgcgactggaggagcgtgaaggccgacaagaccggcatcgtcgtcatcgacgcgaaccggtatccggccggaccgaaatggcgttccatgcgcctgcaggccggggcgcgcgtcttcgagatcgaactgcggggccccgacggcgaaacgattaccacgccggagaggatttggggccattcggcgaaaacccaggcggacccggcgagcctgctcgcgatcatcgcgcgaaagccccgcatatggggcgaaagcccgatcaggaacgatttccccgaaaccgtgcgagccctgcccgaccgcatggacgcacgcacgcgctccgatctgctcgacgacatccgcgccgttgccgccgactgcgggctcgccgccacggtcaaagcggtggaaaccgtcaccaacgcgggacggaccgtcgaccgcgcggcgatcggcacatgcgccaaacgcatcctcgagggtgcgggaaccgaaggcgggcaggatctgaagcgttacgacaaatacatgaaggaggccgaatgagccagcaaaaaccgcggcagcgcggcggccgcgttcctgacaaggccacgccggaacaggtcatgggcctcgcccgcaacctgccgttgacacacagcgtgcccgggaaggccctggaggacgccacgcccggccagctcggcttcctcgccaacctgctggcggccgagaacgcgagccgggccgaatccaaacggcggcggctgcccaaacaggccgggttcccccagagcaagaccctggacggatacgaccgggggcatggcctcgttccccgccgaccggggccgcgaacagctggaaagcctggaattcgtcgaccgggccgaggacctcgtgctctacggcgacgtcggccgcggcaagacccacctggccatcgcgatcggcatgctcgcatgccaacgcatgatacccgtgaggttcctcgccgcctccagcctggtcatgcgcttgaggaaggccaaggacgacaacagatcggacgccgagctcaagtcgataggcagggccgggccggtcatcatcgacgagcccggccacctgcccatcgacatcgacggggccaggctcctgttccaggccggcgcggacagctacgagacccgcagcgtcacctccgcctcgaacctcgagtccggcagatagggcgacgtgtccggagacggggacatggccgccgcggtcatcgaccgcatcgtccaccacggcaggatcctccgcttccacggcgaatcccatcggaacaaacactccctcatgaaataaaccaaacaaacaacaaaacaaacaacaaaacaaggaaccaaccgccgacggtgttcaagttgaacgccgacggtgttcagattaagtgccgaacacgtccacctcaatttgacgaaatacaccaaggggagtttcaggacatcgtagccgttatggacgatgaagtgatggtgaggcttatgaacatcgcgatgatacgcaacgtttcaatgctggaattcctgcccccccccatttgaaattctggagtatgccagtgcgctgtgcttggcgtttacgcggttgtcgttctccgcgtcctagttctttttgttcacaattctcctctagtctgtggtctctcttttttccccgaatcctacatacctagaccgactgggatattttacgaaaagataaaatcgaacaaatgtttgagtgtgtggtatgctgccgttgaagattagataggtgtgagtcggagaatggggctattgtctcggcggggaagagattaatgtatgaactatattcggcaaaaggttggtggaatgattaaagccattggaacttttttgaataccgaacatccggggcttaccaatgtttcagacatattcacggttggtatttccgtgatttccatcgttattgcttttatgtcatatgactatgtgaagaatcatgaccagcagattgccaagtttgaacaagcgaatgagatatcgtcttgggtggtacatgattcgaaaggcggcgttcagatggtggagaattctccattaatgaaggtttccgtcaataatggttcagatcagccgatctatgatgtcgttttaacttctggaacatatcaaggggctggtgccgattatttgagcgggacaaataatactgtttgtgtaggtaccgttcctcctgggagatttacgacttatgttccttatccgggcgaaggaatgcatgttcgtgttgaatcggttattgcctttcgagacaataagggtaacaactggattcgcaacgccaaaggcgttctttctgaaatcaaaacgaattcgtatgaatatctcaaactagatcttcctccagataattggcaatccctcgagtcggaatgacgagacaaaatattgttgatgtgctgtcggcgttatcggatcagttgcccgcttgccgacggttcgttcggcatgttgttgagtctgactccgggcgtgaacaagcataatgttgcctggcatgtatgcgattcaataaaggtgcccagcgggggcatacgctacatcgtcggttcgtgcagcacaaggtcgaccggccccatgcgagtgcttggctaccgcgcgaccgccgagccattcgccgacgagccgacaagcctacaagcctgacgaaggcgttgcgcttacaaatgaacaacgggtggcatccatacatcatgatgaacgagtaaggttgacgggagggggaaccacatgaaccaggcatgcgtgcataacgacaccatcgacgtgggcaaccatcatggccggccgcaatgccggccgttcctgcaatttctgacaacgcaggaacgcaacgtcatttggctgctgctggccatcgcttttcttccggtggacggcaccacgcttggcctgtacgcgccgttctggtcgccaatcagtccggcgctgttcgccgtgtactgcctatgcaattggcgtcaactgcgcatcgtagccaaccggtacctgccaatgttcctcctgccggtggcctgcataatcctgtccatcccgggatggctgaaattcggcatccatctcaacgccgcgttcatgagcatcaccggattattgggcgtgctcgccactttgggtgcgatcgccattgcgttcgacatcaaacgcattccgtggcgtacgccattgcggattctcatcgcttcttactggttctccttcggcgtgggcgtggtgcaatggctatccatccatctgcatatcaagccgttggccggctatttcgcgcacctcatgtaccggcagtacatcaatgaaagctcggtgtggggcggtggtcgcccgcagttcctgttcgcggagcccagctatatcggcatgcatctgttcggcgtattgctgccgcttatgtggcttatgcgtgggcgcgaccgtatctatgccaagcggttgcgcaacctcatcgttgtgtatgcgattggctctgtgctgatgcaggccggcacccggatcgttcttgattcggtggtggcgttgctggttgccattattgtgcataattcgtggtgcgacaagaaacagcgcgtgcgtggtattgcgcagctgctgggtgcggttatgcttggtctgctgggagtgcttgccgattcccgactatcttcgattgcggaaaacggtgccgaaggagacggatcgttcttcgcgcgaatctaccagagtcttgacccgatatgcgggctgctcgcccatccgtggacggtgcttaccggatatggcgccggcaacatcatcaacgcggtatgggccggtgcgaagcatgcgggacgattgttgaatggcttgggtatgaatggaagtgctgcggtgggattcgcggctggcatgaatgcggacaccgtatggacgatgtgtgcgtataccagcgtcgttgccgaatgcggattggtcggcctggttctgctggtcatcgcttccatagtttccatgacgcgtgtcttcgatacggcagctgccgagcatggtgtttggagcaagactgttgtctgctggcttgtcctgatcgtgtacctgtatatccagtgcgagaactacgcgttcgccgcgctgccgttgtttatctccgcggcaagcaagctgcgcaagtaaccatatttgacgggatatggatgtcttcttctggataacttacggttagagaagccgctatcgcaagtattctttaacctgtccacaaggcggcaggcattagcaatcatttgggtaggtaatgttcgactgttcagttttcgagccttgccgctctggagctgccataagcgaaatgagacgtgtttcgttgcttagagtgcagtggtcacggcccgttcggacagcagctcctcgatacttaatatgcaagacggcagtcgatggccgtctatgttggatgaagtgatctgaagtgattttacgggctgcggatttgcgagccgaacggccatagcgctagtttgaccatcttgaacgattgaatgccgaacggaataccaatgatggtgacgcagccccctactaaggggagtttcaggacatcgtagccgttatggtcgatgaagtgatgggcgaggatcatgaacatcgcgatgatgcgcagcagttcgatgctggaattcctttcccccccccatttgaaattttggagtgtgccagtgcgctgtgcttagcacttacgcggttgtcgttctccgcgtcctggttttctctcataattctctgtatcgggcataacccagaaaactgatgcaagacggattgtcatcgtttgttgtggccatatcatgccatagctgtgcgcgagtttctgcatactagaaatccgtgtgaccattcatctgatcgcacggattttttaatgcctgaatcgtaatgcggtgctgtttccgtatcttacgaaggcgtcactatagggattctgcagaggataggactttctcgacgatgagattgtctaaaagtccttctgcatactgtatgggctgctgtgtgtccttgtgatagcgcacgatgactctgccgtagaatttgcggtattcggtcagttcctctccctcgtagccgacatagtaggggtcgtcgtcttcgctcttttcctttgggcattccaatgggtccccgatacgcttgagacatgtgagcatccagaggtcgttgttttctggaagacgtaccaggccgatcacgttattccccttgtgcaggtgctccgcatctttcccgttgtcgttcctttttcgggacagaagccaatcggtgttgagctcatcggggtctctcctgaacaccttgatgggttcggtgccattgtagttggtcatgaaacggattttcgtcctgctgatctcctcgtcagtgaggcgaagcaggtcatttaatttaatatcttcactcatatctacatgatagctcgtgaggacggaaccttgcatttgttttaatgccgcttattgcatacaaagtcacactagttgttggtctttttcgtcatgcgcggaatatacggtgaggggccgccgacatgacaaggaaaatcaagattagggagatgatttctcctgagcgttgaagctcatcaggatatgaaaatgagactggatgccggagcatacgcgaggctgcttctgatggagacgaatagggaagtgtgcgcgagcagcttcagaggtattgacataaggaagcggttttcttggtcttttacgccaaacctggaattcgaaaaggtggcaactcgggcgtgtcattttctttgccctaaaatttatagatttttgaatagttcgtcgatttgagaatttaggcctttcgctgtttggcgtgggtgaattctgtcaggtatgatggttcgtaagtcgagtttgccgcaggtcagatagatcatagtgctgaaatagcccatgttcctgaagccccttgcgtgggtttcacgttctagatgacgcttcccggacccttgaggaccgcgttggcgtgccggtggtcgaagtagatgtcgtccccagtgacggcgtagctgccgtgccaacaccttcataagtgtgtgtttctgcaagttggcgtccgcagccccttatctatatcggtcaatccatgctgtaagagaagacggaatcgcgtcagcggacggccgtgggacgaatgttccgaagcgagttaggggcgtgggctggaatgcagaaaaaagttcgactggggttggcgcatcgggttcgaagacatctgcttgtggcaggagttcatggaacaaatccacaaccaatccatcaaccacggccggattccttgtcccgtcggcattgtgaaacaacggctcatgatgcgcaatacggttcctgcactcgttgatgagacggattttagcgttcaggtccgcacgattcgtcccggagggccacgcgtggtggaggtatggtatccacagaattctttcgtgggctttgtcggtcagatgcgcccagaatccaagtggagggttcgcgatcatcttgtccggttgtatggtctccgtacgggagggtgtggcgttgcgaatgctcgtccggttcaatgcgttcgcgtcgaacgactttccagctctgttatgtcgtggtatagggatgttgacaggtgaatcgtcatcgaacagccagtgcctggtaccgtcccaacgcgagtcgatttctctgttgtaggcattgcgtagtgcgacttcgaagaacgcgatgtccttcatcagggtctgtccaagattgatattccattcgtacaaccggagggcgcgctgcagattgttccctgaagcatcaagatacgtttggagacgtggtgatgagagccattcgaggacccatgtttcatctggagcgtggttgtgcgcgaggacgtcaatcattcttgggactccttggcgtcgtaggcgaacgagtaaagcaatgccccggtgacatgggaaccagcggtcagcacggggcttgtatctataagtataacagatgtttcgaggtctttgtctttccccgttgtctatttagacgtgcaacgtcggtcgaacgcggcgccagactgcgcgaacggcgcgtaagccacggcatcacccaacagcaggtcggcgaggcgctgtgcgtgccgtcgagccgcatcagcgaaatcgaacgcggaacacggaacctgcccgaactcgagcaacgggccatccaatggattcactccatcaccagtccaaaacaacatgatatggcctgatttttgttccgcccttatagtggggcggaacaaaaatcaggccacttcatggtacgtgaaaagatgggtgagtgtaccgcacttttcatcaaaaaggataccgtccgcatctgtatcctaaaacgcctgaccgatcattccgtatgcgcactctttatcggcatgatagagagtagcgaattgtgattctcgcaatctaaagggaattgatgttgttttttcctcgattcattattgtgcagacagcccatatgaacagtggaattgcatagaatgcgtatgattcaaactgaatatataggtatgcgagaagaatgaaccagcatatgttccgtcggctccatccatgatggaccgctacgtgtgctaataccaagagcaagaaggccaaaaagcaaaatagaccaaattcggtaatgaagctggcatagatgctcattgtgaaagtatccgctgggggatttgctaaaccatcgatttcggtattgggcgcaccgccatgggcgtcataccattggcgggcaccggcgtaaccagtacgcactgcattagagatattgcctgcgccccatccaaacatgaagtgagatagatcatgtttccatgaccacatgggagcgagcatatggaagattcttgcactcatcgatccgtcaccagcaagtaatccattggtggctaaagagtttagacgtggattgatgataattgcgctcaatccacctgctccaagaagtcctaaagcaccgacgaacccagctgttaccttacgtgagtggaagttgattgtcgctatcagccagataaatgtagctaccactgtatccagtatgattcgggtgccggagcccatcgcaattgctccagcggcaaatatcggtatcaatatgccaatcttgcggtcgcgggtcagccagaaaactggcaggagtacgccgaacagatgcatgccgatatagctaggttctgcgaacatgaattgaggacgaaagctcgcatagtttctatacagagcaccccaaaaatatgcttgtactggctgccagttcagatgtcgttctaaagcgatatattgcagtatcccaatgaggaatgccgctacatatgcggtgaatagcgtagttaacaatgttcgtacaggtacacgtttaatgcggatcgcgatgtcgagcgaagccaagcacgccagccctaacaatatggagatgaatgactttgcggttgcgctggcgtgtattccatatgactgccagccgtatacggatgtgagcaccagtagcaggggaaagaggaagaacggcaggaagcggcgtgcggtatcgcgcaagtatcgccagttgatgattgtgtacagggtgaacaaccaaggggagattggcgtccaataggggagtggaatgccgattttcgtgccatcaaatggcagcatggccactgcggcaaacatcaacatgtctgatggggtgatggtgatacgagtcagcgtctcggtcattgcgccgtgttgcagcgggggaataaccggagtctccgcggtctcctgaactgacttgttgccgagctgcgtgttgttcggtgtggacatacttggttccctcctatatcctccgcgagaactgtaccagttgcatgtgtgggtgaggtgatgaaggtgtgggcaacccttcgctttcgggaaataccgttagttgctcatttccatctgttgtttccgcatggattggttgccgagtcatgaattcgagtcgatttaatatgaataataaacggtgtctaattgaagtaatgtcttagatatattccataaggtttttatctgctcgattgtcatgaaaccaagtaatatttgtccaaaggaatttgcgattccgggagcgttgatcgataaaaccaatagcgtaataaaataagatgaagatactattggatatatattggccttatctatccaagaagaagatttttgtaattttattgtttgaacagtcaatcttattgcatgaatactagaaaagatgagtgaaacaagaataacacttattattctataatcgatatacagataaaacatgactaatgatgtgatggccagtaatagagatgatataatcagttgcacaataaaatatctatctttaaacacaatttttttaataatcataaatcgacctaggttataatcgcaatatctattcggctcgcagtaggtgccatcagtaattttgtccggggtgactaagccagcaaaaatcttactgaggatatgggtatcgagccatactaaagtaggatgttcccactctgatttgaaaataatgattacaagaccagccgtttcattgccgcctggtatattgccatccattgtcttatatccgacagatgtgccatcctgctggaaaagcgtattcggcagtgggaatccattattctttgttgttttaaaactattatagtaagtttgactgattatttgcgtatgaaatttatacttactttttagaacaatattatcccatatttttgttggatgcgtgttgtcggatggtataaatgcgttaacttcaaattggtatccgaatgtagttttactgttcggcatatttactgcgacttttacatttgtagcatttatttgcaaatcggtatttgcatcattggctatatatatccttgcctcatatgtgttgccctcggcaaggttcatagtgtccgtccacccatttgtggattctggattccaattcttgtgattataatttctgacacggaaaaagttgcgttcgtcgccataattggggttatctataattgaattcaatgtgttgaatggtgcgggattttctgtgttaaaagttgttcgttcaggtccccatgcgagagctgtttgagaagaaagggagagtaacgctagagtggggaacagaaaacttgtaagaacgattgttaaatattgttttatttttatggagatgtatcgtttcattttctttcctgcgcgaactagagaagatattgcgagcaatcgagcgatgtcggcaaatacctaatacctcattaagcataggtcctttttgaataaatatcatctggctacgctgttgttggtcattgcggatactccatcgggtttcaacggaacctttttttcagaacagaatcatgaccgccatacgtggtgcagccatcagcgtgtttttccccagaacaccttgacatgcggggaatgactgcgtgtcataatccgaatccggatcgggtaacgggtcgactgacaggcacggagtatctgggacgcgtactacacgaaatttgcggcccctgtggacagcaataacaccgcaaaaggtggaaggaagacatggcgtcaacccctcaccggcttgaccgtaactgacagaacacatgagaacgcggcagacgggccatgcgggaacacgcctcaagacatccactggcacacaggccgatatcgggaatattcttcaatgttttatacgaaatatgctcgttaatgatatagcgtggaaacaggaaagattcggaatgaccatggaaggggaaatgaccaatgagaaagaacaaaagtgcaggttgctggctggggtggttgatatgtctgttctctgcattctgcgggtatgcgatggagcgttcatcatcgagttgcagaagcgagcaggggcgattcgaaactcagcagaaggccacggaggaggccggtaatcagtcgtttcctttcggggaggggcaggaaaggcctgctgttgatgcagaagaatccaaggccggaagaatggatctcatgcaaaggattggcggagtgtgttggagtcttgccggcattgtcatagtgttcggcatcatttggggaggattcctagggcatgatcttaccggccctgaatcagctgtatggttctgctcagtagtggtgctgatggtagtgggtgcgtatttttatgatcctcaacgacatgcgctgattttccatcgttctgttgacatattgtttggctttttgctcgtattagtcggactggtttttggccacgagtggttgtttcccagcaacgtaaagattaacaagtcggctgtggcatgggcagctatgatttgtattctgcttggattatgtatgctgtgcgcggcgtggctcagttgggtcaggaaaagtgcagcggcacagaaaatattccggcgaattactcattatccaatacttttgggtttgttgttggtgatggttgaaattagcgggagtaaggaggactgggttgcccaggcgttcattacctatctgctgatccaaggcgtacgcgacgtgtggtacctatggttggaaaaagacgatgagggaatccggaaggatggctgacggcataaaagagaaaaagaatatagcagtatgtcggttcaaccgtgatggcatgccatctgtaggcgaatgccgagtgtcgtcagatggtacgggaatatgtaagctgatcgagcttaacggcaaggaggctgaattgatggcccacattcatgtcggcgggatgtggagccgtatcccgtcttggggagttctctatcgcacatagacgaatgactgtggtgccgccttcacttggggtgcgtactcgtcgaggctgcagggtttcgtaagccgtctgacggcggaaatgcgtatcgcatatgctacctccttgccgtcaaagtaggtcataaacttctccttcgcgatgccgccgttttttttggttttcttccatattctttcaggcgagtcttggataatctccgcgatactcgcctcagccacgacccggcagcatgggctggtcgaataaatcactatcgtgtccacgtcttcacgtttgaatattcgtttgcggaactcgtatttcttttctccagaaagaatacggtcaacatattccggcctaatcgacaatatagccttcatcaacaccaccaagctcaataatctttctgaaagttttaccggaaatcggcgtacatgccagtcttccctcaggaatcaaacctctatcgagaagttcgcccctagtagggtatcgattcaatgggaagttgaagaggagggacatgacccaggggaacctctggctggtccaaaagttctcaagctcatcctgcgagaacacactccttcctttcacgtaagacaggaactcgtttttgtcgtagaagcatgacagattcttcacctccataactgtacagacggaactgaccacagaacggtaacgagctgaactttgcccatcggaagtacgataaatgactacgcgatcacccaatcgcatatttgagaccatgggcgacttggacaggtagattttctctatcgtattgatggacgtcgtgtcgggaacgggaatgtccttctcgctccgtagtgatacatcaccgaacattcggacatggtacttgggccagatggagagtacatagtcttgtccggtacggggcattacgaagggaaaactactgtatgagcctatctcatctgcggagggcctgcgtttgatccagacgtcttcactgccaacagtgctgttctttttagcaatgcaggtaaacccatactgactgagcatttttcgaagggattcggtgttgtcggcttcgaacatggtgacataagcgtattcgcaactgcttttagcaaaggctctgagagcgattgccaaaagccttttgcccacgctggtatgatgactgaaatcgacttttttaaacgtacctatcttcaatcttttccctgtcaggggaggagtgacgtcatcgtctttgccatcttcttttttcaggtacagcatcgcctgaattttctcatcatggttaagtaccacccacgtattctcatttgaaagggccttcttctgaaaccatcggtcgaattccgccccgttgtaagcagtccttaaactatcgaaaaaagaatcggaaagatcaagattcgcaaaggggaccagcttaatcgcgtcgtcgcgttccaccaacattcttattctccttccaacaaattcatgatacaggttcatctgagtatctccgtcacccagatctttcgtgtattcccggtttatgaggaaacataccgtaaaagtcgagtatggagaccgtagttatggctataagttctttgtcctcacttctcctgattttacagttccatcccaaatttgagtatatgagtttttgaggtgtcctgctcgttcatcggccaacgtctcaacatcctgctgaccggggccaccggaagcggcaagagctggctcgcgtgcgcaatcgtcaggcaggcgtgccgtcaatcctaccggtccctagtacacgcgcatgcccgatcttgcggaacaactcgacaccgcggccggcaagccggccggcatacgcaagctcatccgcaaatacggcgcgtacacgctgctcgtattggacgaatggctcctggacaggcccgacgaacgcatgcgctccttcctgctcgaggtcatggagaaccggtacgacaacgtcagcaccgtgttctgcacgcaataccccgtcaaggactggcacgggcggctcggaggcgacgtgaccgccgacgcgatcatggaccgcatcgtccacaacgccatcaccatcggcaccggcgaatacaacatgcgccggcaccaagcgcgaccagccgaaaaccagtgacaatcagccggccatgcaccaccggtggccctcaaccagaagaccaccggccctcagccacaatacccacggcccccacccgcaataaccagtggccttcacgccatcaaatactcatcactgttgtttatgaacaggctcacagacacctcatcaatatgattaatgtgatgaatagtcgatggtccaaatgaaaactacaggatgcttgtctcctgtggaggaggtctggtattcatcacagtactggtagttgatgcgtgccatgcttgaaacctcgtagtgaatcatccgtgagaaaccttggagtttcggcttacctgcctttcctttcaggaaagtggttgatgcgagagcagttgggccgcccgggttggaggcgacgtgatcccagaactgttgggcctgctgtaatcccaccctagagacaatttgactccatgcatctgcatatttccgatggacgagtatgcggtatgtggggtgtcgtgaaggtttgccgcctggccggcgtgccggttccaaaggagtgtatgcctttgtcactgattgtcgtccttatgcttgtctgcggatggtatcgagacttccgcgaaatccttggagtctacggtatcctgaagaagaatttttttacggagggggtcttcgagctggccagccgtggtcttccagtcttttatagttgcgtccaactcgctgtagttctcgtccgcatcacaggctatgagctgatccgaaatatcatcgcagaacgatgtaagatcctcattgtcgaacacgcgcaaccatgcgagatctcctagctcagcaacggtaggacgcctgtttgctgcgagaagacgacgcagccgctctagtctcaatgaccacaacctgttcttttcgagatcggctaatcttttctcgggaagcatgacgagctcttccccctcagagatgcggatacgggcgcgtccatcattaacggctgtatttattacctctactcgtttggacgcaagttctgacgcggtgtaaataaccattagttccctcacgctgctcttagcgcgtatacgatgacaaaacgattgcgcggtattgtaggaaaatctctcggcaatcggattgtcgtacacggttggacaaacttatgtttgataggttactataaccaatagtacttgtcaatattttatataagatgttaggtgaattatgaacaaagtcttgtcagatattcgccgtgatgatgttgaggcgtgcttcaagatgctttatgaggccctgagcaggcccatatctgaagaccttacggaaagcaatttacgtgcagacacaattaggatgtcattgcatcttcttgaggaattcggtatagccgatgatgtactacgcttcggcttcgcgcagttcgtatacagcccgttgctcttctccatgctgggcacagtccccaacggccattatccagatgacttgctggagggctggcgccgattgactctgcccccgtctttcgatgtttcatctggaagagtggatttacagtggctttcgaataccatgctccgatttgagagatggtttgcccaagcctctttgtccgatatagtcaatcttaccccgccgtctgctggtgaatgggagaaagttctcctagttcccctcgatgaggaatctgtgatagctcagtacgtatggctgtgcgaccgttatctgatttcgaatccagaggcatgggccacgacttcactgcatcaggagtatcggcttgcgcaagatggcgataccggagatttcccgacacgggcggtggtcggtcaacctgtaactcaggttgagttggaacataacatagcgttgcgagcggtttatgaatctactgagggcaccgctcgctaccgccttttccaacaggtatatgaggccgcgttgaattacctggatcgcgaggagtatagggcggcctccacgttgtttcgcttctatttgaggcaatatcccggtgacgccaaggcgatgaatgcctgcggcttttgccttataccgctcgaccctttcgaggccgaaaaacaaattgatcaggcgcagcgattcgggctccatgaaaaaggtctcggaacgtacaaccaatgcctttgtaaaattctgatgggagataagattcaggctttgcgcatcgccgatgaatattggtccgaattccgtacggcagaggtcggacagcctatctccgcagtgatttggcgattggatcagaagggtcggtgccgcatcatgggaaccgatgatgtggattcaagtctcatcgatttgtgcctggatatgtgcggccggctttcagatgatgaacagcgtctgcgctgggaagaaagacgacgatccttgacttcggatttcggttctcaaccggaaaactaacggattgcttgttcatctcgcaagctgttcagacataacacgaatcccaattgcagtgatatatatcaggaagatatacggccgtctgtttaataaatatggatatctcattttttgtcgactggcctgtctctatcctgaattgctgcagcgagaattatgtgcatcccatttcgcctatggtttcgggcattcggttagggattgatcttcttcaagaatttctacaccaatctcctcagacgctgtccgctcaatagaacaatgttcgtgtaggtgcattgaaggtatcaacttgttcaaacacacgccggggcatagtgattgagactctgcttggataagactaggcgagtctagccgcgactatgcgcatcaggcaatatgtttcggcgaaagatcggtaggtctcttacccggattcatgctgatagcccatatgaacagcgggattgcataaaacgaataggcttcgaactggatatacaggtatgcaagcaaaatgagccagcaaacgtttcgtctgctccagttctgatgtaccgttatatgggccacgataagcgccagaaaagctgcaaagcatgcgagcccgaattcggtgatgaagctggcgtacacgctcatggtgaaggtgttcgcgggtggattggcaaggccgttgatttcggcatttggcatgccgccatgtgcgtcataccagcgtcgggctccggccatatccggtacgtaccgcgttggagatgttgcctgcgccccatccgaacaggagatgatcccggtcgtgtttccacgaccacatgggtgcgagcatatggaagattcttgcgctcattgagccgtcgcccgctaatagtcctttggtggccagagagtttagccgcggattcagaacgagtgcgcctaggccgcctgaggcgatgatgcttagcatggccacgaatccgaccgtcgctttgccggagcggaagttcacgcttgccacgagccataaaaatgctgcgaccaccgaatccagcacgattcgtgtgcccgagcccatcgcgatcgcgccgatggcgaatacgggtatcagtgtgcctatcctgcgatcatgggtcagccagaataccggcagtaatatgccgaacagatgcatgccgatataactgggctccgcgaacatgaactgcggacgaatacttacgtagtacctatacagagcattccagaaatacgcgcgtaccggctgccagttcatgtgctgtttcagggccatgtattgcaatatgccaataagaaacgccaccacatatgcggcgaacagcgtggtcagcaatgtgcggacaggcaggcgcttgatgcggatcgctatatcgagcgaggccaggcaggccaatcccagtagcagcgcaatgaatgatttcgcggcagtacctgtatgcactccgaacgattgccagccgtatatggaggtgactacgggcagcagtggaaagaggaaaaacggtaggaagcgacgtgccgtatcgcgcaggcaacgccagttgacaacggcatacaaagcgaacagccagggggaaatgggcgtccagtaagggaacgcgatgccgattttggtgccatcgaacggcagcatggccacagcggcgaacatcagcatgtccgacggcatgatggtgatgcgcgtaagcgtctcggtcatcgcgccgcgttgcagtggctggatgataggggcattcgtgactgtaagggtctgttcgttggctggctgtatatcggtggaagtggtcatgccgcagttccctcctcttcggtatccgcgagaactgtaccagctgcatgtgtggaagaggtgatggatgagtgagcgaacaaggcgcttgtccgatggaagaaacgggataccatggaacgacggtgtaggaaagaagacaggcatgaaactggactggctttcatcgtgccaatcggacgcgcgtcctcggccacggtgtccagcctctcctcacggcaacgctagctattggggaaaccgctgaccagcttcatacagggagtgatccgaaccacaattctcccagagaccccggtcgaagagcttccccagttgatcgtcgactacttcaatggcctagaggagacgccggatacgaatttcattgtcgccggatattccagggacaagaccggtcagcttttgtaccgggtcaatgtcaggggggggaccgtgaagctgcaggatacctcggctcagggagctctatgggatggagagacttctaccctgaccaggctggtgcaggatgtctggctgagactagataacggaagttacgatcctatcccttccgaagacatactttggaactacttcacgttgcaggatgccgttgactttgccagatatgcggtggaaacaaccatacaaactatgcgtttcaaaaacgtcgtgaaaacggtcggcggcagtgtcgatatccttctgatcaccgcggatgacaccagatggctgcaaaggggagaactcacctgacgattggcgaccaaagacggactaccgagcatgtaagtcttcgtgcgatgaggaacgctaccctcctacaatcatattagtcagtggtttcctgcatgtggcgtggcgcactgaggacgacatgcgcctcgagtgcctcaaggtcgtcggcctgctgcgcatcgccctcacccacgccgaagccgcccaatgggcattcgctgccaccggcgtcctatgtcgccatcaagggcatccgccactgtaggattcgaagcgaaatgccctctatcctccatatcgaatgcccctgctacacattcagcctcattgaactactcgcctgcgccgaggaatgacgacacggctgaaacggtgtgcatgggtaaggacacgcggatattggcctataggaacttttgtggtgctttagaccggtcggaacgactgccacttcgcgtgacgtggttgttgtctgtcgattgcatggatttcgatgccgttaatgattgctgtgtctgttcgatagaaagtggaacatgtgagcgtgtgtcttccatatgagctacaggtttatgggccgatgcatcgtgccatcggcccccgcgtgtgattgaggtcggaaagacgctgatagtgactttactgaaccggaatcagtagtggttcctttctattggtattcgtttgagcgactaattcatcatccttgagtccagcaacagtgatgcatcctcgaacagcgagtggcacatcgcctgcatcataatgttcgacctgaatggcaggtcgaaccaatcccatgatgcattgatatgcctcatactccgtgacccgcccggtaacaatcatgttccgcgaatgccacccgttatacaaggcccggttcagcattccgtccaccatgccaccggtaagcacgccttgaaaataggattggcgctggctgtcggttgtgtcgctgaacaagctgagcgtgcgaaccccgtaaagggcgtgattgaacccatagacgtgaagtgttttgtatccgagctccgcatagtcggggtcgagatggtctggaccctccaggctcagcgatgcctggagtatcgaatcattgagcatggcgctgcgtatttcaccggtgatgccggagaagaaatcgagaatatggttgttgtggatcaatgccatctgagtatggctgccaggcagtaccactatatatggtgtctctgcgtcgagactatccatgatgccggcaacttcagtctcttcgccgcgaatcatctgcagcccgacagcatcttcgggggcggccggaatcccgtgggggagtctggtgcgtattccgggaatcatttgtatgggctgtggcagaatgcgtgtgtccgtataaaaaaccatggagttgcgcagctgatttatggacacgggcagctccagatgagggatctcgcgtattccatctgggctgctggccatgccagacatatatatactgtcgatgtcgtctgtcgacagtgaatttcggtcgagcagcatgaagtataggctgcggatggtctcttccagcatcgttgccgaattgctcatcgcactgtttctggcgccgacgtgtgttgcggcgctgtctatgagcgtaccgtcgttcagcagatatgcgcgggtgttcgtggttcccgtgtcgaaaaacatagtgttcatgcgtggccgttccttgtttggggctttccggatattccggggggttcagattacccacattatgcggattgcagttcggcaaccagggccgacgcgcgctctcgcatggctgcgaggtcgatgctgccgttgggggctttgggaaacagcgctgatccgatgccaacacacatggcgccaccgcgaatgaaatcgagggcgttcttttcattcacgccgccgaccgcgcagaacggtattcccggcatcggtgccagtaggtccttgcaatagctagggcccagcgttgccgccgggaagatcttgatgatgtcggctccctgttcgtaagcgtggcgcacttcagtgggggagaatgctccaggaatggaaatgagtccgattttcttagtcatgccgatcaccgaggcgatggtgtcgggagacagaatgaattccgcgcctgcttctgcggccgcgcgcacgtattcgggtgtggtgacggttcccgctcccacatgaagtccgggaaggttgaggtttacgacgtttacgatgcggcgagcattctcctcctcgctgttgttggcgttggctgcaatctcgaggaatcgaatgccggattcgtgcagtccttggaccacgggcgtcagttggctgtcgtcaatgttgcgaagaattgcgatggcttggttttgaaattgattggtgtacatcatcagtccattctgatatagggacacgttcggtattcagtatacataagatgaaaaatgctgcaactgggatatctgtgcgacatgctgataaagatcagtaaattattgcactttctggctttcaaaatgctgtgaaagtgtcgcggttgacaatggctaatcctgaattgtatgctcttattgttcgtggttcagaacatggacgtatatacgaacggatgatcgtttcgaaggagaacgaatgaagatcaccgacattaccacgtacttgataccccataggtacgcattcgtccgtatcgacactgacgaaggaatcaccggatggggcgagccccttgtcgaggggcgagcgaagacaacgctcgcagccgtcaacgagtggcgtgaataccttatcggtaaggatccgcgcaacattgaaggactgtggcagaccatgtaccgttgtgccttttaccgtggtggtcccgtgctgatgagtgcaatcgccggcatcgatcaggcactctgggatatcgccgcaaaatcattgaacgttcccgtctaccgtatgttaggaggtccggtcaagaacaaagtaaaggtataccgcagcattcacggagataccccggaagcattggccgacgatgccgaaaaggccgttgctcagggatatacactcatcaagtcctccgcgctggggccgatgcacttcctcgattctttggcacgaatcgatgaggtcgccgaacgtatcggcactgtccgagaccgtgtcggatatggcgtcgacattgcggtggacttccacggccgcgtgcataagcccatggctcggtctttggcccgggcgctgaatccattcaggcttgcattcatcgaagagccggtgctcccgacgaataaagaagccctccatcagatagccgacgtcagcgatgctccgatcgcattgggtgagcgcgtgtacaaccgttgggaattcaaagacattctccacgacggcgctgccgatatcatccagcccgatttgtctcatgccggtggaatcagcgaatgccacaagttggctgccatggctgaggcgtatgatgtcgcatttgcgccgcactgtcctctgggacccatcgcgtttgcggcgtgcatccaaacggatgcagtcagcgaaaccgccgtattccaggagcaaagcatcgacctgcatgactgttccagtgccaaccccattttcgacgtgctcgccgaacgtgatgcattccactacaaggatggcttcatccaactgcccgaaaccccgggtcttggtctcaacatcgatgaagacaaggtcgaggaattaggacgaatcgggcacgactggaagaacccgatctggcatggctacgatggcacgcccatcgaatggtaatgacctatgaatcctctaatccatagacctaacaatcccgacaatccatcaacccaaacaaaccaaacagtccagccagatacaaggaggtatctctcatgaacaacaggctgaaggcgactatcgctctctctacggcagcaatgctcgcactgtccgggtgcggagccaacaacagctcaggctcagacggtggtacggtgaccatcaaatacatctcctcaaccatcctcgaatcaccggagaagaccttcgaacagcaggctatcgatgacttcaacgcacagaacaatggggtcaaggtcgaagtcgaaggtgttgcagccaacgatcttatggagaaatacaccgcgctggccgcctcaaattctatgcccgatttctacatggccgacatgaagaacaccactcagctggtcgacatgggcatcaccgaagatatcagcactgtgttcgatgaagactacctcacccagttctccaaggattcgctgagcggctacactatcgacggaactgtcagcggcctaccgtggttcacggtggcccaaggcgttgtctatcgtactgatctgttcgagaagaatggtgtgaagccgcctacaacatgggacgagcttgttgacgcggcaaagaaactcacccatgatgaccagtacggtatcgcactcgtgggttccaaggacgccagtggcgccggtcgattccagtatgtgatccgtaattacggtgttgatgagttcacccagggttcggacggcaagtggacgactgacatcggcggtgaggattacgtgaaagcgctcaccgcattcaccgatctggataccaaggacggcgtcgttcctccaggcgttacggagaccgattactcgtctgccgtgaacctactgtcctccggccaggctgccatgctgattaccggttccaacgccatcggcgccatcacttccaaggttcccgatctcaagggcaagctcggatcgttcatgattccggaagtcagccgcaacgtgttcagccagaacggtttcggcttctacattaacccgcagtccgagcataaggacgccgtagccaagttcttggaattcatcgtcagtaagaaaaagagcatcgagttctcccagctcactggacgtctgccaacgctcactgacgcgatgaacgattcctccatcggcaaggatgaggcattgggcggcttcatggaacagattaagaccgccgagccattcattctcccgaccatcaacggatttggcgaggttaatgacattcatggtgaggcctatcagtctgtgttcaccggaaccgcaacgcctgaagaggctgcagcgaaagctgcgcaacgtgcacaggagattgtggatgaagccaacaacgaataaccaatagcaataggggacagcgggacttgagattagggtctcgtgcccgctctccctaatcttttgaaacttgtgaaacttcgcaaaaggacagtgtagtcatggcacaaacgaacaccttacgcaaagtcagggaaaggttggaggggcctgccttcatcacaccaacgacactgaccctgtttgcattggtgctgtacccattcctgtacggcatttacgtcagcttcttcaaaaccaacctcatcaataaatggaagttcatcggccttgataattacgagaaagccgtcacgggctccgacttctggcattcgctactcctgacggtgattttcaccgtcggtgtcgtggtcggacacttcgttctcggctttctgttcgcgaacatcctcaacaaggaattccgcggacgaaccttttttcgagtgctgctgctcctgccctggctgcttcccgaagtggttgcggcaaacgtattcaagtggatacttcatcccactaatggcgtgctcaactcctggctggtcaaactccatatcatcgatcagccgatgagttggctgggcaaccccaaaatcgctcttgcggtcgttatcgtcatctgcatttggaaaggcttcccgctggtcatgctgcagatacttgccggattgcagaccattcctacggaactgcaggaagccgcccgagtggatggtgccaatagcactcaggtgttctggaagatcaccctaccgtgcctgaagccgactctcatcgcggcgctcgtgctcgacaccatttggtggttcaagcacgtgaccatcatctggctgctcacccaaggcgggccgggcaccagtaccaccaccattgccgtcgatatctacaagcaggcgttcgaatacttcgactttggcccggcatccgcattggccgtcgtcgtgttcctcatctgcctcgttatcaacttcgtctaccagaaggttttgaaaaatgaagagaactaagctccgcacgacgggaatgtacgtcgttcttcttcttggcgcattcttcgcggtatttcccgtgttctatatgctttcgaccgctttcaagccgattagtgaggtgatgggtcgcagcgcttccaacattctgccctcacatcccacgttcgaggcgttccaagcggtgttcaagaactatccggtcgggcaatatattctgaacagctgctggacggccggagcctccaccctgattgccattctgttcgccactttggccggatacggtttctcgcgattccagttccgaggcaagggcatgatgcttctgtttatcctcgccacccagatgttcccatctgtcatgctgttcattccgtactacaagctgcttggcacctatcatctgtccaacacgttgaccggtctgattctggtgtacaccgcgaccgtgctgccattctgctcatggatgatgtacggatacgtgaacggtatcccgaaggatctggacgaggccgccagaattgacggatgcgggcagttgcgaacctttttccaagtggttgctccgctgacattgcccggcattctgtccaccggaatctatgcattcgtcaccagctggaacgaatacatgttcactgccttgttcacgtcctcggatatgaagaagacgttgtcggttgccatcggccagatggccgggtttgacagtgttatgtggaacgaggttatggcggcgtcggcaatctccagcttgcctctgattgtcctgttcatattcctgcagcgctacttcatcagtggcatgaccgcaggatctgtaaagggttaacggtcgctcggcattgtgccatcggcgggaatggttcggatttaatgtttccgacattcccgccgatagcgcttttctgggcctcgcgggtattgtgagagtagatgttcgtagaagtaccggttgcctgacaacagtgtcggtggccgaaagaagcttattccaagctggaaggagcgggatgccgcaaccgcacaaggcgacacttcgagtagtccaagtactcaactatgtccgtgtccatagtgaaacgggtgcgactcttgctgaaattgcacaaaccttcgatattccgaagagcagtcttctgccgattattcacacattgagggatgagcatttcctgacctatgagccggcatcacagcgataccgcatcggttttagcgcttatgaagtcgggcaggggtatgtgcggagcaattccgcattgctcgatattcgctctgagatggaatacattaccgaggcaaccggtgaaacctgttacttcggtgagcttcgcgggggtgatgtcgtctacctgctttccgttgaatccccgcagccgattcgcatggtcgcgtcggtaggtaatacattgcccgcgtacagcacaagtatcggcaaggctcttctctccggatactcggtcgatgatctgagaaagctgtatccggatgggctgaaaaagataacccctcacaccatcaccgatgtccacgtactcgccaaccagttggcggagattaaggtcaccggcgttgcgtatgagactgaggaatccacgccgggtattcgatgcgcggctataccgctgacagtgaattctcagattcgcgcggctatcagtgtggccacgccactattccgcatgaccgatgaacggatggcctatattgttggcttgctaaagcaggagcagcccaagttgcaaaggattctggccgcagctgacgcgggggagtaagggagttttttggattttcggatgctgtcgaggaactcttcgtggtattcgattgtgttttgactctcactacccttcgatgctcgagtcaattcctatggccagaatgcgtttcattgattccgatacccgtattttcatagggcgcttcccggcttgaacgacaagccacgttttttcagcgagacggtcattctccatgacgtccttgctgaatcgattgaccttgatggcgcgtactgatactgccttcaccgctagctctactgtgtgctgcaaagctgttcaggctttgtgtttctgcgtcgcctttcccgagcagttcgtcatccagttagcttgtcgtcctcattaatttcgccgaacacggccttaccgcctcacctcggaattcgattaagcctattctgcaatgcggcaatcattgtgcccatgttggtaatcagattgaaagattgttctatgccgtcggcaaatggttgtagcggtcggaatagattaccgattaaacgaacagtcggcatggcttgtgtcgcctctggctgtatagcgaacgaggtgtgcatattgtcaaacgttgcgccaatattatcgatttgactgttcctcaggctaccttgcggaagatcttggataaaacctactgtctggttcatgatggagtatgcgtgatgccaaagatttgacaggttatctgttgagttgttcagccgtttcagtgcgggatttaaatcgttcgatagatgctccgcccaagcggaataagcagcagcgtcgccgtttaccggcgaaggctgattgttgactatcgtcataataccttggaatgactcggtaaactcattggcagcaacattgatttgtggcgtcagatgttccaattcgctccataagctcagcaaagcaggccccttgtcgccatcttgaatatgagattcttcttgtgtgggattatcattgcgagatttattggcgatatcctcgatgactgtacgaagtctggctacgatatcgagaacttttctctggtattctttaccagacattagtcgcaattcgcctacctgtatccattgcctgttgtgcgcaatactccaaactggatcctgcttattgattccggtcataccgtctatattgcggagcatgagggggaggatacgattcgttccgttctctgtgactcgtgcatcgaaatctaacagctctttgcggcatgacgcacttcggatgtagttgggagaaattattggcagaatgacgttggccgtgtcaataccgcgatcgagcgcatcacgccaattttctccccaattgatggaatctttgtctatgaatagaccgagtccgctgccgtattcatatttatattccttgatgatgtcttcgataaggcgaatgactgccccatcgaggtgaacattgtcatcgtggctgtagctgaggaatagattagcatcaatcgggccttcaccaagagaatcagacgtaatcgtctccggttgcgttgctggggaagtaagaagtgatcgtgttacggctaatggagctgtctcctctcgtaggaatccgtcgctgtcccatagggccgatatcggtaatgcccacatgtgctcgttgaattgttggaccttgtcacccgtataaaatacgtagcctcggtgaaagcgtttgtctttgtccgcaagcgcagcgataccggcaaagtcctgccgattcaccgtgttattggatttcatctccagcgcaatgagttgatcgtcatggagaagcacaagatctacttctttgggtttgcttcccggttcgcgccaatagaacgcatcgggatgaatgctggaccattggatttctggcacgatttggttcactgcaaatgattcgaaaagttcaccaaatagaacacgatcttctcggaaatctctgccagattgtctcagtatttcggcactgaaggaggtgcctattggatggattttggcgcgagtgaatatttgtttgccgggggcggaacggagattaggcagagcagaaatcaggaatcggcgtaggaagatactgatatagcgttcgatagttgccggattcgagctgattgtgtcggatatttttttgacgttgagaatacttcctggaacggcaagcaattctgtaagaactgcgttagcgatagttctatccagacgttctcccggcaggatagtgtctcccaatacattatcgatatctgttcgtacggcaagtcgcaaatcgttatcagttattggaacggaagacagtatatatgagggaaagccgccgatggccatgtatctggacagtgcattcctgtcggtttccgagtgataatccgtgtttggaatgccattccatagaaggtcgacggcactaatgctggtatttttgttgagttctcggcgggtgaggggatatagcgaataccggatagagcggcgggtgagaggatcttggccatctagtccattacgtgtgattgctgctgagccggtgagtacgaagagggggttgctaccctcttttccatccacgacattcttgattgcaagaggtagatcggagatacgttgtgcttcatcgataatacatggagtcggaagtgcattaatccactcgtccagatgagatgaggcatagtcgaaagtacgtttatcggcaagtgtctcgtaatgatagccgtcacgcatttctgtttggacaagcatcgtcttgccgactgctcgggccccccttcaaaatggccacttttcggggacagcgattcagtatctgtgctaacgggcgggagacgtatcgtgggttcatggcatccatgaatgcaattttatcatattgaatggaataaaataactatttatgtgataaaaaaatcatatataacatattttctatctacttagcagcatttcattgtctcgcagctgagttccatagaaccggggtgggccagtccagacctttcagaatcggcgatgattggagcattgattattgggcatgacgctacgtgaacgcctataccatcattgcttatcggtttgtgcgtaaacgtgcgaatactttaaagcctgaaccctcggtaattgaggatccaggctttaaaaataatcgtgggattgcgaattaagaggtaatcactcagccttcttgcggccgcggcgcttcatggtgccggcggtggcgttcgcgacgtcgaaaatcacggtcttgctgtccgggtaggcggtgccgttgacggaaacgaaggcgacctcgccttccggagcctcggcaagcgtgaagtacttggaaatcgtctcaacaagcacggcatccttgatgctcacagacttggtctgcttgccgtcacccttgctgaacttcacggcattatccgccttggcggtagtcggcgtgacggcaatttgtctggttttatcgttaataaggatcttaacttgtgctggaaaattcagcacttctgcggtggccttattaaaacgtacaacggaatcggtaacggtcattaccgttttgccaacgggcttaactagctgaacttcttcgaatccttgaagcaaggatgccataatatactccttcacactgcataaatattattgacaattttgattgtaatgaatgataatttgaattacaattctatatatcacattctcaatttcaattcataatatggaatagggaaatagtgctgtcgcaaaatattgagtgagaatacattgtgattgcgattgtgtacggttattctgcagtcgtatcaagggttttggtcattgttcacaaggatacaaaagctcgagaagttccccggtaggtgctaaattatagaccatctgtgagaatttcccgaagaggtaaggaagaacattgaccatcgctgatttgctgcagattgttcgcaagcatctcgcgtctgcgattatctcgttcgtggtggtgtttgctgcggttgcagctgtcacgttcatcatgccgccgaagtacacggctacggctgaagtgttcgccacgtatgccggtcagtccggcgagacgcagactaccaacgatatgagctcgggtgccaattatttgaatacccagatcacgacgtatccggaactggtgaagaccgaagccgtgctacagcccgtcattaaggacctcggtctggatatgaccacgaccgatcttgccgatgtggtgaccgctacgaaccccacgaacacgttcatggtggatatctcggcggaagtcggcgatccgcagcaagcggccgacatcgccaacagcgtggcgaagaacctggccgatcagatttcttccgacctgtacaacaactcctcttccagcggctctcccatcaagctcacggtagtgcagaaggctcagactcctaccagccagagctccccgaacattccgctgtatctggccgcgggcctgattctcggcctcatcgtaggcattggcgttgccctgctgaaggacatcctcaacaccaaggtggactccaccgatgatgtgcgtgagctgacccacgcttcttcgctgggtactgtgccacaggccacgattcttgacgacagccgtccggtcgtagtcgctcagccagctggtagcgaggctgaggaattccgccgcatccgcacgaacctttcgttccttaccaccaccgccacgcagggtcatggccgactgctggtcatcacctccactgatccgtccgaaggtaagaccacggtttccgccaacgttgccgtggctctcgccgaggaaggcaagagtgtgctgcttatcgacgccgatctgcgccacccgtccgtggctcacaagctcggcattgaaggccacgtgggtctgtctcacgtgctgtctcgccaggcgtccccggccgatgtcattcagaagtattggaagccgaacctgcacatcatgcctgccggcaagcgcccggctaacgccagcatcttgctgaactccgatctcatgaaggaaatggtcgagcaggccctcacccagtacgattacgtgattatcgatactgctccgctgtccgtggccaacgacgccaccgtgttcggacgtatggctggcggtctggtgctcgtgactggtaagggcgtagtggagaagaaggagctggagaacaccgctacggctctgcaggccgctgaagtgccgattctcggcttcatcttcaacttcgctgatccgaagaagatacactcgaagaactattactactactattacgaggacggcaacaagcgcagctctcataagggtgccaagagcaagggcgagaagaaagcccgcaagtaatagtttggcgtttgccgatcgtcttgcaatatgaaccgtgcggtacttctgtgccgcacggtttactgttataagactgagttgttggatttatggtgctggctgtatatcgaatagtaaagaattgtgacattcctgaataccagctggcacgctcggcatagggctggataaactgacagtttggaatgacttcaatgatgcaaaggaatgagaagagcatgggaacagacgaacgtcctgaaccgaacgcggaatctggttcctctacgtcgccggctcgcggtgacatcgtcgacaccttctgggatataccgcccatctcgttcgacgagaacgacggcggtattgcgcagggtgacaatggtacgggggctgttgcgggtggcgttcagcccgtcttccccagctttgacgaagtattggaatggcctactgcgagtgcggcgaatactgctggcgatgcctcttccccttccgatgctgtggctactgccccgatgactttttcggcacctgatactgcggaaagtgctcagtcgcctcagcaggatgataatgcgacgctgccgcttttcgcgccgatttctgaagccaagccgcaacgtgatagtgccatagacgatctgaacatcgacttcagcgccatcgaacagaatcccgagccggtggaggagccggaagaagaccgtgtggcagagactcctcgcggtggcaagggcggcaagaagaggaccaagggcattatcatttcgctgattgctgcgctgatggtgattgcagcgatcattggtggtgtatggtactggcgtttcagcgagcagcgtcgggaaagccatcagctgcatcaggatgcgttgacagcatgtactgaggccgtgggccagaattccaccgctcagaaggcgctggccaaggcgttggccgacgccaagagtgctcaaagcattacagctgatcaagtggctgacggcgcgaccatagatacgctgaagaaggcaattgctgcggtaaagaatgtggaagcggtggagtgcaagacttcagcttctacgtcggacctcaaggaatatgccaaggcggccactagccagaccaagaccgccaagaagaacgccactgcgattactgctgcggcaaaggccgtgacggacagcaagaacgccaaggatcaggctaacgctcagcaggcgttgcagagcaagatagccgaggctcagactttgctggacaacagcctgtatgccgtcgacgataattcaacgcgagtgacgctggaaagcgacatcgccaacgccaataccgtgctgtcccagcagggcactgacgtaaaggccatgcaggatgccgtcaacatgttgactgcgtccatggatgcagtcaacacgtccatggcaaactacagtgcagctgttgaagctcagcgagaagcagcgcggcagaaagctctgaatgattattatgcacgattaaggcagcagcagttgttgcagcagcaacagcagcagcaacagcaaaaacaactagacgatgaggggacaggcgacccggcggctggtcaggggacggaacggaatggtgagccgaagccgtaagtgattgtgctctagcctaaattgtcaaaggaaccgcgaataacagtagcgcgcatttccaccatttgctgttgcgaaccagctcaatatacgcgtgctttgtgccgctatgccgtcacggattcgtataatcagttgtggggggcacttcgtatgacacggtaaaagtgacctctagggcgttgcataatgcgaggattcggctgataaggcgcagaaatgccgatgccggtccccgatgattgggaaccggcatcatgcgcatgagttcgctcggcgtttgggccgggttcactcagccttcttgcggcgcggaacctcttgggtacgtgttgatttggctggcttagtagctcttgtgcttctgccaatgcgcgtacgcgccggaaatcgagccatagcggccgttgcaataattcacaaaccacttgaactgggtctggtagttggtctgccagtctgcacctgcggaagccatcttgctgcccggcagcgcctgcggcaggccataagcacctgaagacgggttcgtggcggtgggactccagccggattcgtggctgatgatgaagttggcggcggtgaagtcggcctcggagtagccgttggaaatcaggtagtcatgcgcccaggactgaatctcgccggccggcgtggtggtaccgaggctggcggcgctgggtgaagacacggtggcggtgcccaccagaatcaccttatcgaccggagccttcttgacccaggaggtgaacacattggaggaaacgacctgatcgccggagcgggttaccagagacgtggtctccagcacgcccttctcgccttcggtctcgaccttctcctggcccttgggcaggctcgaggtctccttgcgcacttcattgaaggcgatttcggtgtcggtggtctccaccgtggtgttggcgcggttgatggaaatgactgtggactcgctgaccttggaatccaggctcggagttacgctgtcttccggatcgaggacgatatcgccggtttccagcacatccttgacggtggtcatgttgtctttttcgccgagaaccacgcgagacttgccattgaccttgacggtcacgtaggtggtgctcttgagcgcgccacgggatgccgaacgggaagccgcaccatcagtggcggagaatgaggttggggtgatggaaggtgtagcggtgctcgactgatagaagtcgcgagatataacgcctgcagtggcaatgagacccactgcagccacggccgccgcgatcttcgcccactggccccgagacagggttttgacgaatgaggtccgctcagcgtgcttcgacattgcgctccttggttgggtacacactgctctccatcataggacgttgagtggatgaataaaaaaccgtggtgggtgttcgacccgccacggatggcatatgtagtagttggcagtgcaaggaagtgctatatatgggcttttccgcgcttccgctgccgtagtgcgataaggcttactgctgctcctgcgctgcctgctgtgctttggcggcggccagatccagcgccttggcctgggcgatgagatcgtccagatcggaggcctgcagcgcgccggcctgctggaagatgacctcgccctgcttggcaatcatcagcgtaggcacagcttgaatgccggcagcctgagccagatcctgattggcgtcgatgtccaccttgacgaaagcgatgttcgcattctccggctcgttggacgcagcttcgaaaatcgggccgaacgcgcggcacggaccgcaccaagtggcccagaagtcaacgaacacgatttcgttgtcagtaatggtcttctcaaactcagctgaagtgatggcggtggtggccattgaagttccttcctcaaacacagtgcttgatgctgtgtaccagtttcccagcaccacccaacatttcggcaaaagcttgtgccccaagctgaatggattgcgggcgcatggaggcgatgaggcgctttgttgagaattcacagacaatttttcggtgaattgtgcccatgttcatcaatgcgcgcgataatgagaccatgccagtcatgaatgatgaagtgcccgatgagggcgattacgatgccgggcgtggccgcggcgaattcgacaacatcacgcccgaggacttcattcacgggggcggttcgggccatggcaatcctccggggtggcttggcccggccgatatcaactgggcccgccaccaaatgcccatcgcatacgtggagatagtgccggtgcgtaccgatgaaatggggcgcattgcccaggtcggctcgttgctgcgcgtttccgaagacgggtccattgagcgcacgctgatcaccggccgtgtgctgtatcacgagacgttgcgcgaggcgattgcccgtaatgtggccaaggatttgggagatatcgcgctgccgttgctgcccacctcactgcagccgttcaccgtggctgaattcttccccacgccggggctgggcgaatactatgatccgcgccagcatgcgatcgcattgtgttacgtggtgcccattgccggcgactgcaagccgcaggacgagaccctggacgtggaatgggtggacctgaagagcgacatgatggatacgttcgtggcgcagatggtcaacgggcatggccacatcgtgcggcaggcgctggcttgggccggaatctgagttttcaacctcccgccggcgggaggtggcgcgtagcgccggagggtggtccggggaggattccgtctgagaccacccccagtcggctttgccgacagcccccgccagcgggggcatgaatgtgaaggagtaattcatggcaatagaactggccaatcatatatatagggacggcgagggcgtgccagtggtgctgatgaacgcctacccggtggaccaccgcatgtggggcgtctgtgcaaaggcgctcgccgactttgccgatctggaggatgtgccgccgttcccgatttgggcgccggatatggcgggctcgggtgaatccccggttcccagcgaggccgattccgggccgcgtatggccaacggcgcatatagcgaggctttggatcgactggccgatgcctacgttgatctgattaagaccgctggttacgaacaggcgatttgggtgggcctgtccatgggcggctatgtggcgatggatattcaacgccgccaccccgaagccgtggctggtctggctttgtgcgacaccatggccgcctctgacggtgtgggcggcgaaggccgtctgaccatggcgaacgctgccgagcagaccaactccgtggagccggtcatgcatttcgcacgcccggccgagggcgattccaccgtgaagcgtacgcccgaattcatcgagaccatgaccgcttggatagaggagcagaatcccgccggtctggcgtggcgtcagcgcatgacctatggccgtcccgatatgagcgatgtgccggccaccatcagcgtgcccaccgtggtggtatccggcgagcaggatccatccagcaacccgagtgtgctgaagccgttggccgagaagatcgccggcgcagaattcgtggacattcccgactgcggtcacttcagcgccgtcgaacatccggacaccgtggcccgtgccctgctctcgctcgtcaagcgcgtgcaacaacactgacttcctcccgctggcgggaggtggcgcgtagcgccggagggtggtctggcgaggattccgtctgagaccacccccagtcggcttcgccgacagcccccgccggcgggggcaaaactacattctggagatacgtatgactgctgacattcacttttcgccgttggcgctgacccgtgcgctgccgttcctgccgcttgcccaaggcgatatcgactatcaggtggatcggcgcggcgagcccgacctcatcaacacgttgctcgcggacccggccaccaaagtggtgctgacccgtggtggtctggtcgccgtgccgcgcgggcagggcgacctggtggattacgaaaacgtgaaaatgcggctcgccacgctgccgggcgcatacgttggcgaggagttgcgccgttaccctgaagcggtcgccatgttcctcggctcgtacggtggtgtgcgcggcgaatgcgtgattgcagtggacatatcccgcgtaccggacgccggtgaaggtgctgtgcccggcgcacagcccaacggcgtactgggtgttcaggatgccggcactgtcgatggcgcgatgggcttggccaacgccaacggtaacgctgctggcaagcgtgctggcgaatcgggcggagccgccgaatccgctgctccctttggtgtgccggattcagctgggcaaggtgcggatgacgcatttgacgagtcggtcagcaccccggcatcccacgccgcgccgaagcccacactgctgcaacaggccgtaacgcggttcgattgggtggatttgcgtggatttgcgccacacgccaacgcgcgggaagccggtcaggccaccagcgcggtcaccctgagcatctggcatagccgtcagcggttctgccccacatgcggtgcccccgtgttgccgtcgctcgccggatgggcgcagcgttgctccaaccaggctgacggcaatcgtattctgttcccgcgcgttgagccggcggtgattaccgctgttgtggacggtcaggatcgtctgctgttgcagcacaatgcggcgtggaaagacccgaatctgtattcggtgtctgccggattcgtggaagcgggggagaaccttgagcatgcgtgccggcgtgaggcccgcgaagaaaccggcattcagctgggcgaggtgcggtatctgggatcacagccgtggccattccctgcctcgttgatgatggcgttcaaggcacatgcgattaccacggatgtgcatgtggacggttcggaaaccgtgaccgcacgctgggtcacgcgcgacgaatacaccgccgagctgattgccggccgaatggtggcaccagggcgcgccaccatcgcacggtacatgattgaggagtggcttggacgcgagctataggttaggctggtgtgtatgagtgatgaaaccgaacagccgctgaacctcgatattcccgagcatcttgagtactccgacgaacacgtatgggtggatcgttcggacgatcttgccatcatcggcatcaccgaatacgccgccgaccaactgggtgagctcgtgtttgtggatctgcctgagccgggcacccgcgtggaggccggcgacgaaatcgtggagcttgaatcctcgaaggccgtccagccgctgatcagcccggtggccggtactgtgaaatacgtgaatcgcgacgtggcggacgacccgtccgtggtgaatggcgatccctatggcgaaggttggattctcaaggttgagctcgacgatgatgagcccgagctgctgaccgccgaggaatatgccaagattatacggtagccaagtgttcaggaactcataacctgagtggcctatattggtgcatatgagaagcccacgcgaggattttgaagcggccgcccgacacctgacgccagtacatggcagtagtgcgccatcgcccgatgacatgcctacggtgccgattcccgcgcgcaaggccgccaccactttcgatacaccgtccagccgtgagcggcttgaggtcaagccggcgttcacccgtgtgattcgccgtaccctcaccggcacgttcggcatttggtcgcgtctttccgcactggcggtgcgccatctcggctggtatccacgtgtggaaccctatgtgggctatggcaccagcgactattcgcgattgatttgccgtacggtatacgctcccgaaaacgcgcgacccggcgaggtaagcagaggcattcgcggcatgctgaccgtgcccgccccacgtacccatgtgcaggccagcattgatgacatgccgttgaacaccatacaaattggtgattctgaagtgtatgacaaggtcgatcgcacccgtgacctcagtagcgaatatgcggtctctgattccgcgggctaccttgacctcgtggctgagcatcgccttgaacccggtattcatcgcgtctcgtacagcgtgaagcgccgcaagcccgtttccgccaacctgtacaccattccggccagtgccaaagtcggcatcatctccgatgtggacgacaccatcatgatcacgcaggcgcccgtgctgtggaaggccgcctacaatctgcttttcctcaacccgaagaagaaggcttccgtgccgggcatgagcgtgctgttcacgcgcatcgccgatctgtttcccggtgcgccgttcttctacctttcgacctcgccatggaatgtggaaagttcgattcgtaacttcatcaccgatcacgggtttcctgaaggcccgttgctgttacgcgatcttgacccgcgcccgaagaccttcgtgccttccggcccgcagcacaaactggagttcgccgagcagcttatggctgattttccggacatgaagttcatccttgttggcgacgatgggcagaaggatcccaccacgtatgccaccatcgcccatcgatacccaggacgtgtgctggccatcgcgattcgtcagctcagtcccaaggaatcatccggtttggcttccgtggcgggcctgacttccacgcagccgatgccggtcaccgacgttccggtgttcaccggcaccaccggatcgaatatcttgaagaccatgctgccgtatctgaaagaacacgtggtgtgagtctcgcgtacaatcgcgtggtatgaccgacgagaagacgaacgccgaagtgccgatgccgcctgtagccaagcgcgaaacgaagcgccgtgaattccacggtgatgtattcgaggacgattacgagtggatgcgcaataaggaatccgccgaggtacgcgactacgtggccgcggaaaaccgatattgcgagcatcgcatggcgcatttggccggtttgcgtaacacgctgttcgaggagcttaaatcgcacgtggaagagaccgatatgtcggtgcccacgcgcgtgaatgactactggtatttcacccgtacgcagcagggcaagcagtacggcgtgcagtgccgtatacccgtgcgtggcgagaacgattgggagccgccggtggtggacgccaagggcgagcccggatccatgcccggcgagcagattgtgttcgacgtgaaccgcgagtccgaggggcatgatttcttccggctcggtggcatggatttaagcaaagatggccgatggctgctgtacggcgtcgacgtcaccggtgacgaacgctatgactttcgtattcgagacttggagtccttgacggccgccgatgctgacggggcgttccccgacctcgatatgccgatggctgatgaatctctgtctttccgcgatgcgggcgcggccgaaccggctgaagcgacagccggtgacgaggccacggaacgtcctgcggcggcggaactacccgaacactttgatggtatcggcagcgcatgcttcaccccggacggtaaatgggtgttctgggtggaggtcgatgattcctggcgtccgtttgccgtatggaggcatcaggttggtacgtccgttgacgatgacgtgtgcgtgtatcgtgaagcggacgagcgtttctgggtgggcgtgggcatcagcttcgatgagcgcaacatcgtaatcggcaccggttccaaaaccaccaccgaagtgctgatgttgcctgtggtcactcccgaaggcgagtttcaggcgttcattccgcgccagaccgacgtggaatacgatgtgagctttgcctgctttgaaggtgcgggtgagcatggcgaggatgtgccgcttgccgtggtctatcacaacgccgtcaacccgaattttgagattgatgttatcgacatgcgcgaccataagccgccttaccggctgggtgaaggcgtatgcgtggctgccggctcgccctatggctgtgagcatggcgaatcggataagccgatcactgaagcctacttcaatcccgccaatccggcgattctgcaaggtgcgcatggtctgggcattgagggcatcgccctgcaccgccattttgtatcgctgagctaccgttccgacgggcagccgcatgtggcatatatgaccaaagacgctgcatccgctgattttctggctggtcgtccgtggcgtttcgtggagttgttgcctccgccgcttgagggcgattgggacatggtcgcggcggataggcaagacgtgaccggagaccacggtgaaaccttgtggaccgatgatgccgaaaaggctgaatcatctgccagcgcgagcccgggaacaggtaaatccgcgacctccatgaaaggtgacggtatcagcaagcgcagcggcgactggtttggcgatttgttcggctcgaccaccgaccacaccgaatcctccgatggcgccagcgacgaccacctgcccggcgagacccggcgactgtacaccatcggcaccggcggcaatccctcgtatgacgcgccgcgcatgcgctactcctttgccagctacacgcgtcccggcgagttgcacgaaatcgatcccgccaccggaaaagacgcgctgctcaagcgtgccactgtgctgggtgacttcgacccgcgtaattatatggagcgccgcgtgtggattaccgcgcgcgatggtgagcggattcctgtttcgctggtctggcatcgtgattgcccggcgcaggattcgccgatgttcatcaccggatatggcgcatatgagatttcctccgaccctggcttctcggtggctcggttgagcatgctcgaccgtggcgtgctgtacgcagtgccgcatattcgaggtggcggtgagatgggccgcgcttggtatgagcaggggcggcgactcaacaagaagcattcctttgaggatttcgtggatgccacgcgcgcattgcaggacgctcatttggccgatgccagacgcacggtggccaatggcggttcggccggtggcctgcttatgggtgccatcgccaacatggcacccgagtgctatgccggagttgaggccgatgtgccgtttgtggacgcgctgacttcgattctcgacccggatttgccgctgaccgtcaccgaatgggatgaatggggtgatccgctgcacgaccccgaggtgtatcagtacatgaagtcctacacgccgtatgagaatgtgccggtcgccagagcggaggacggtgatggagaaaccgtcgatgacaaggtctcttctgctggtgccgccaccggcaaggccgtttccgcagcgcagttcccgaagattttcatcaccacctcgatgaacgacacccgcgtgctgtatgtcgagccgctgaaatggctggcccgattgcagtccgcaggcgtggacgcggtggccaagattgaggttgaggccggtcacggtggcatttccggccgttacaagcagtggcaggaggtctcgtacgagaacgcctggtgcatggacgtgatgggtctcgctcattaggtgtcatgtccactagctgagctggttcgggccatcaggtggccacgcgactaggctccttgaactatggcaaagacatataaaattgccgtcatccccggcgacggcattggcaaggaagtcactccgtgggcccagaaagcgcttgaaaaagcagctgaaggtgtagctgacttcgagtatgagaacttcgacttgggcgccgagcgttacctgcgtgacggtgctattctgccggaggacgaagaggaacgtatcaaggcgaacgacgccattctgctcggggccgtgggcgatccgcgcatcaaggctggcattctggagcgcggcctgcttttgaagcttcgcttcgaccttgaccagtacgtgaacctgcgtccgtccaaactgtacaagggcgttacctcgccacttgccaaccctggcgacatcgacttcgtggtggtgcgtgaaggcaccgaggggctgtactgcggtgccggtggcgctgttcgtcgtggcacttcgcaggaggtggccaccgaggtgtccatcaacaccgcctatggcgtggaacgcgtggtgcgttacgccttcaagctggccatgaagcgcaagaagcacgtcactctggtgcacaagaagaacgtactcgtcaacgccggcgatatgtggcagcgcattgtagacaaggtcggtgaggaatatcccgaggtcactcacgattaccagcatatcgacgcagccaccatcttcctggtctccgacccgagccgttttgatgtgatcctcacggacaacctcttcggcgacatcctcactgatgaagccggttccgtggtgggtggcgtgggctactccgcctccggctgcatcaacgcctccgatgaatatccgtccatgttcgagccgattcacggttccgctccggatatcgccggtcagaacaaggccaacccgactgctgcgattctctccgccgctatgctgctcgagcacctcggcttcgatgatgcggccaagaagattcacaccgctgtggaagcggacatcgaggagctcggctccactgtgcgctccaccgaccaagtcggcaaggacattctggcccgtatgtgatgtctctggctcccctcaaggaggggagccaagtactcttatactggtcgcatgcacatgcgacatggggaatgcaaaacgccgggcggcaaactggttgccgtgaatgtggccgtcgacgaggatggcacaatcaaatcctgccatatcagcggtgatttctttatcgaacctgacgtgaccacctccacccgctttgcgggagcccccgccagcgggggcgaggcttcgaaagcattgattcatgaccttgagcgggctctggttcgaggcggttcgctgcaatccgtattggatgcgcactccgattgccggcttatcggcacagacgcatcagccatcgaaacctcattcctccgagctataagcagcgagcttacgcccccgccggcgggggctcccgcaaagcggatgggggtggccggcgcagacaccaccggaacttctgcatccgtcgatacacaatatgggcagaccgacaaaaccgccaaatatcagtcccgctggaacgagctcaagcgtaacctcaccgtcattcgcgaccatccacgcaccccagccgagcagatggccatcgatgaaacctgggcccgcgaagtcgcagcggggacgaggccacccaccatccgattctgggaatgggccggtgcggccgtggtcatcggcaaattccagtcagctccggacgaagtgcatctggccgtggccgaacagcttggattcagcgtggtgcggcgctgcaccggcggcggcgcgatgttcatcgagcccggcaacaccatcacctattccctgtatgcgccacttgatttcgtgcatggcatcagcattgaggaatcataccggctgtgcgattggtggctggtcgaggccttgcgtggtcttggtcttgacgtgcgattcgccgggttgaacgacatcgcctcccaatacggcaaaatcgggggagcggcacaacggagattccccggaaccggtaacgccggcgagccaggcgcggtgcttcaccatgtgacgatggcatacgacatcgatgcggccaagatggcccgtgtgctcaataccagccaggagaaactttcggataaggcagtgcgatccgccgttaaacgagtggacccgatgagaagtcagaccggtctcacccgtgagcagattatcgatgatttactcgtatggttcacccctgctcaatttcgcggtgatgcctcgtagcgagggtcgcggtggctccgtgcgatagatggaacgtcgctgtcgaatcccgcgggtcgcgttacaatatgacggatgaccgatgacggccacacagataaggacggtgcaatgagcttggaaacgccaaatgcttttgctgatgaggagaacatcctgctgcatacggcactgttcaagcaggtctcgcccagcgaagccgaagaactgttgccgtatctgaagcacgccgcatacgacaaaggcgactacattttctctgagggcgataccgatcaccgtatgtatctgttggagcgcggccgggtcaagctggttcgtacttcttccgacgatcgtgtgcagttattgtccatccatgcgcccggtgaagtgctgggagagattccggtattcgatccgaatggtggtccccgcaccgcgtcggctgtggccatgagccatggcacgtgcgtggtctggttggagcacgacaccctgttctcctggctggacgagcatccgcgtgtggccatcgatatgctgcaggtgatggctaatcgtcagcgcgataacaatgagcgcatctccgacctggtgtttatggatgtgccggcgcgtttggccaagaccctgctcaatcttggttcccgcttcggtgagccggtggaacaaggcctgaaagtgccgcatgacctcacccaggaagagctggcccagctggttggatccagccgtgagaccgtgaacaaggcgttgatggacttctcgaatcgtggctggattgcgcgtgatggccgatcgattatcatcttccagccaggcatgctgattcggcgctcgcggcgctaacggcacgtttcttcacgatttgctgtatatccagttgctattcagcaaacgttatacgagtgcggttcttgtgatgattgaccattttgcggggccgaacactcggttggtagggcgggccatttagaatggggcccatgcccaaaaagaagtcccttacagttcgtcgtgtgctcgttctgctcttggcctacatcatgcttgccgtatgcggtggtgtggcgaccagcgtgctgcttatcccaggcgtcatcggtgccaataacgtagccaaggcagtgattccgtcactgaaggtcgagaacgtggacttcgatgtgactagtctcccgcagaagtcgacgatgtatgcgagcgatggcaccaccgtcattacggatttttacagccagaaccgtatcgtcgtgccgctgaagaagatttccaaggtcatgcagcaggccgtggtggcgcgtgaggattgccgtttctggacccacgccggcgtggacgtgcagggcgtgatgcgagcgttcgtcaacacctatctgttgaagggcgatcagcagggcggttcgtcgctgacccagcagtatgtcaagaacgtgctgcttatgcaggccattgaagacaacgattcgattgcccaataccatgccacggaagacactgtggcacgtaagattcgtgagatgctgatctcggtgcagatggagaagaagtacaccaaggccgagattctgcagggatatctcaacatcgcccagtttggtagcaacctgtatggtgttgagaccgcggcccagcggtacttcagcgtgtccgccgccgaccttaatgcagtgcaggcggctacgatcgcggccatcaccaagaacccgaacaagtatgacccgctgattgaggcgaatcaggaggagagccagaagcagcgcaatcttgtgctggatctgatggcacaggaagggtacatcagcgagaaggaatgcacggaggccaagaacactccgcttaaggacacgctgaaagtacgggacgtcaatgtcggttgccaggataccggcgattacgccttcttctgtgactatgtggtgcaccgtatccagaactccgaggagttcggcaaaaccgctgccgagcgtagcaagttgctgcaggaaggcggtctgaagatcgttaccacgctggatgttgacgccaaccgcatgcttatggacaccgcgcgtaacactattccgccggacgatcccagcggtatggaaatcgcaatcgccgcagtgaaaccgggcactggcgaggtgctgggctttggtctcaaccgccactatgacgccacgcctgaggccgcgaacgacgctaccaaaacgagtcagaactatgcggtcgatgccatcgatggcggtggcagcggctggacgattggttcgtcctggaagcccatcaatctggtcgcatggatggaagcgggtcattccatcaacgacaacttgcagaccaccactgcgtactccacttctgatttcagctgcggcagctacaccggcggtagcgaactttggaaggtgcagaacgcgttcggcacgaccgtgaacccggaaagtccgttcctcggtctggttcgctcgcacaacaccacgcaggcttccatgggcacaatcatgaagctgtgcaaggtggctgacaccgccacggagctcggctaccatgacgctagaaccggtgagaccattgaaaagacctcttcgtacacgccgtccatgatggtcggttcagtgaatgtttcgccgttgaccatggccagcatcttcgccgtgtatgccgcgaacggtgtgcaatgcaacccgatcgctatcaccaaggtcaccgacggtgacggcaacgacctgaaggtgccttccgccaactgccatcaggcggtcgatccggaaattattcagacacttgcctacacgttgaaccagggtgtgaccaggtctgacggtcagggccataacttccagctcaacaacgggcgtaagtccttcggtaagaccggtacgagcgaagacctcgccgtatccagcggatcgttcattcccaaccagattgccgcgtttgcgtcggtgggtgatgcacaggctccgtattcccatcgtatcgccaacatccgcatcaatggtgtgtacaacagctactgggatggttcaacgattgcagcaccggcattgcgcaacttcctcaatgcctacgcggatgcgaagcaattgccgattgataacgactacggtcaaggcgttgcgaagtacatgaccagcggcactacgttcggtattgccggacgttcgtatagtacgagacggtcaaccacgacgaataacgataacaataacaataacaatgattcgtccacgaacaatgagtcgaacaactcacagaacgatcagtaacacatgacgtattacctacatatgtgattgctggttacgtagttgacgggcgcgggccttttcgggcctgcgcccgtcttacaataatgacggatattgtgccgactgcaccaccggcatcgaccggcatcggaaaggggagcgatgagcgacgatgagacgacgcacggcaattttgatttccgagggttcgacgtgcccgaactggaggcagtgacgcttgccgcagcggcggacggcggcaaatctgcaggctctgggaaatcgggtaagtccggtaaatcaggcaaatccagcaaacataagtcagaccaagacaagaaaggcacaacggtggctaaagaagagaagaagaccaagaagaaccgtccggggctgttcaccccgatggagctgcgtggccttaccgtgcgtaaccgcatctggctgccgccgatgtgcacgtattccgcctatgcgcgtgatggcaaacccacgccgttccactaccagcattatgtgtctcgtgcctttggtggctttggactgattattgccgaggcgactgcagtggcaccggaaggccgtatctcgccgtgtgatctgggtctgtgggaagacggccagattgacgcttggcgctggattgtagatggtattcgtgaggccggagcggtgccagccgtgcagctcaaccacgctggacgtaaggcttccaccggatgctttgcagtgggatatgagaatcagagcgtgcctgttgaagcgggtggatggcctacggtggcaccgtccgaaatcgcttttagtgggttggatatgccgcgtgcactgtccgtggatgagattcatggcatcgtcagggccttcgccgctgcggctggccgtgcggtcgccgccgggttccaggcaattgagattcatgccgctcacgggtatttgatttcccagttccttgatccgctgagcaacgagcgtgacgacgaatacggcggtgatctgaacggtcgtgcacgttttctgctggagatcgtggacgcggtgcgcggagttgttcccgatactttgccggtgttggtgcgtatctccgcgactgattgggccgcgggcggctgggacctggatcagacgattctggtatccaagatgctcaaagagcatggcgtggatctggtggatgtgtccaccggcggcatcgtggctggcgtttcgattccggtcaagccgaactaccaggtgccgtttgccgagcaggtgcgtgccaaggccggcgtaccggtgacggcggtgggtcttatcaccaagccgaagcaggcggagaagattctgattcacggcgaagctgatgcggtggagattggccgtgctgcgctgcgcgacccgaattggccattgcgtgccgcccacaagcttggcgtgccggttgccgaggcgccttacgcaccgcaatacgtgcgtggcgcgtactgagtgttgtgtacataggctcccgctggcgggagccgaccggcaaagccggactgagggtagttaacgtacatacgtcgaccaccctcagcctcactgtgttcggcagctcccgccagcgggagccgggatatctagattcgcaaactacttcacgtccacgccgacggcgtcggaaacatgctcgaatccatcacggcgcagcaggttggctaggccgcgcttcaatacggtgatttgctgcgggccacggtacatcagcgagctgatgaacatgaccaggcttgaaccggaacgaatcttctcataggcctgctcgggggtgaagacgcctccgatgccggcgatggcgaaccggtcgccatagcccttgtacactttgcgaatcagctcattgctggcctgcgtgcacgggccgccggacagaccgccttcccagtcgcgcggaatctcaagcccggtgcggtccttctgcagattggcgatggacaagccttgcacattgtgctcggccagcacatcgagcagttccttgtactcaccccacggcttgttcaacggcatcttgaccagcgttggctgcgggcgatcgatcttgtcgagtgcggtgaacagtcggtcaagtgcctccgatgtggaggtgaacggttcacccacgtgtgtgttcggacaggagacattgacctccaccattgcggtacggccggcggcacggcgcatggagatgcagtaatcctcgataccttcgtccaaatcgccgcactggtcgtcgttggtgcgggcgatcgagacggacacctgcatctggttcgcctgagtccatgccgtttcggcacgctcgatgaccttgtccgagccgatgttggcgagtcccacatgcaccatcatcgaatcgtattcgggcagacgatggaaccagggcttggcgttgcccgggcatgggcgggaggtggtggagccgaccgtctcaaagccgaaaccggcgttgtcaagcagcacgggcatctcgcagttcttgtcgaggccggcggacaggccgaacgggttggtgaagtcgattcccatcacattcgtctccagaatgggatcggtgtagttgagcatcatgcgctcggcgaacagcagtggcggcatgtgtttggccacggagcaaaattcgatcatctgatcatgcgcttcatcggggcgatggttgaacacgaagttcggcttgatgatgtgcttatagccaaaagtgaacaggtcagtggtggctttgttgacggcgtcgtgccaaaagctttcagaaacgtaagtcatattgcccattgtctcacgtttcagcagattgtgaccagcatggtgttcctattctttaagttcgtctttcttggctcccctctctgaggggagctgtcgcgcagcgactgaggggagattcgtgggggggggtgctgcacggtggctgaaggaagttcggaacattacatgttgacagtcctgaaaaatgtgcgtttttgcgcggttttgcaggagtataggtttgaatcgcccggaattttcgggaaattgtccccaaaacgctcaagccggtttggtttgtgagcttttgtgtgcgataatgttcgcatgatttcgtcacaacgtcagcatctcatcttgagcaggctgcgcacgcgcggtgctgtgcgtattactgcgctatcgaaggagctgggtgtgtcagcgatgaccatccgccgcgatatcgccgaacttgccgacaagggtttgttgaagcgcgtccatggcggcgcggtgaccactagtaccttgctgagcgagcctctgttctccgtcaagtcccagatggacatcggtctgaaagatgccattgcccaggaagctatcaaatacgtggctcctggcgacgtgatcgccatcggcggcggcaccacggcctatgtctttgcccagcatctgctcgaatcgcagcggtccagcggcatcaccattctcaccaattcgattccagtggccgagttggtgcaggccctcgaatccaaggatgtggaagtgattgtcaccggcggtgtaatcacccgctcaaactcgcttgtcgggccgattgcggacaaggtcgtcgcctcgctgcgcgtcaacactgtattcctcggcactcattcagtgtcgattccccgcggcttcctcatgccgaactcgcttgaggccgctaccgatatggcgatgatggacatcgccgatcgcaccatagttttgaccgatcacaccaagtggagctgcacgtcgctgtcgctgttcgcgcgcttcgaccaggtggacacggtcatcaccgacgacggtctcgaccctgactccgccgccaaaaccaaggatttggtaaaggaactcgtgctggcccaccagagcgagaccattgaggaaagtgagtaacacccatggctgatttcgccaactacatccccggagagtacgcgaagaagcatatccgcatcacgccgacgacgcttgccgacggtcgtgacttcttctatctggacgacgatcccgagttcgtctccggtgccaagacccgcgagctcaaggatccgcgcccgctggactaccgttttgccccgcacctggacgccgacggcaacgaagtgccgtacgccgctccgcagatgcgccgcgacccgctgaccggtgactggattccgatggccaccgcgcgtatgaaccgcccgatcaccgctggccccggcgccaccgccaagggcaacccgctggccgcccgcaagcccggcgacccgtatcaggacggcgaggtgccggacaccgattacaacgtcgtggtgttcgagaaccgcttcccctccatggtgcgcgtgcctggcgtttccgaggacgtgacctacgttgacggcaacccgctgtgggaaaagaagctggccgccggccgctgcgaagtcatctgcttcgatccgaacgagaacggcctgccggctgacctgccggtgtcccgcctgcgtaccgtggtcgaggcatgggccttccgtaccgctgaaatctccaagatggagggcatcgagcagatcttcccgttcgagaaccacggtcaggagatcggcgtctcccttgcccacccgcatggtcaggtctactgctacccgttcatcgccccgaagatggagaaggaactccagcacaccgaggcctaccacgagaagaccggtggcaacctgcttaaggacatcatgaatgccgagctcgaggctggcgagcgcattgtgatgcgtaaccactcttgggttgcttacgtgccggccgccgcccgctggcctcttgaggtccacgtggctccggttcgcgacgtgctcaccttggacgagctcaacgacgaagagcgttgggaccttgcctccatgtactcgcacctcctgaagcgcggcaacgcgttcttcgacaagggcgacggcaagggcatggacctgccgtacatcgccgcatggcaccaggccccgattcacgacgctcgccgtgagaactaccgcctgaacctgcagttcttctccttccgtcgtgctgccaataagatcaagtacctcgctggctccgaatccggcatggccgcctggatctccgacaccacgccggaactcatcgccaagcgcttccacgagctcggctccatcgatatcgccgactgatagaaagaaaaacaccaatgtctgctgttgaattcattgagccgctgacccatgaagagggcgtctcgcaagccaccaagctgtttgtggacacctacggcgctgcgcccgagggcgtgtgggctgctccgggccgtgtgaacctgatcggtgagcacaccgattacaacgccggcctgtgcctgccgatcgctctgccgcaccgcactttcatcgccctgaagccgcgcgaagacaccaaggttcgcgtcgtctccggcgtggctcccgacaaggtcgctgaagctgatctcgatggcctcaaggcccgtggcgtggacggctggtccgcctacccgaccggtgtggcttgggcgctgcgtcaggctggtttcgacaaggtcaagggctttgatgccgccttcgtctcctgcgtgccgctgggctccggcctgagctcctccgccgccatgacctgctccaccgctctggctctggacgacgtgtacggccttggctacggcgattccgacgccggccgtgtgaccctcatcaacgccgccatcaagtccgagaacgagatggccggcgcctccaccggcggccttgaccagaacgcttccatgcgttgcaccgaaggccacgcgctgctgcttgactgccgtccggagctgactccgctggagaacgtctcccagcaggagttcgacctcgacaagtacaacctcgagctgcttgtggtcgatacccaggctccgcaccagctcaacgatggccagtacgctcagcgtcgcgccacctgcgaggaagccgccaagattctcggtgtggccaacctgcgcgttaccgccgacggcatctccaaggccgatgaccagttccaggccctcaaggaaacgcttgacgccctgcctgacgagaccatgaagaagcgcgtgcgccacgtcgtcaccgaaatcgagcgcgtgcgttccttcgtgcgtgccttcgctcagggcgacatcaaggctgcgggccgtctgttcaacgcttcccacgattcgctggccgccgactacgaggtcaccgtccccgagctggacatcgccgtagacgtggcccgcaagaacggcgcctacggtgcgcgtatgaccggcggcggcttcggcggctccatcatcgctctggttgataagggccgttctcaggaagtcgcccagaagattgccgacgagttcgaaaagcagggcttccacgctccgcgcgcccttgcggcttatgccgctccgagcgccagccgcgaggcctgagctacttactttggctcccgctggcgggagctgtcgaacgtagtgagactgagggtggtttgtcgtatacagtgaccaccctcagtcagcttcgctgacagctcccgccagcgggagccccctcctcttctctttttccctccctatcgtgccgcgacacgcggggcgtacttacgaagaatttcgaatcgtattacggttgcggattgttttgaaaatcgcatggcttctgccgaaatcacatggcaggccatgcgttttttgttgccgtcgttggcccggacgttaggggcatatcgacatttcgcgcgacggcaatgatgaagaggcaatccgagagaggttccgctgtccgctacccagacaacccctgaaaatactacgtccgccggtgtatccggccacactatgaatacgagcgatgcccgcgaatccttcgatgagggcagcaacagcaatatgtcggctactcagcggcccagccgaggcgagtccggcgtcgcggtggtgcggttgagagtctggccgtgtgaacatggcccaacggactcgatgattcctgagagtccgcgaatccggaaatggaacggcatgaatggcgtgatgcaggtttgtgacttgtctgagctgttccattccggcggtattggtgcctggcaacggtcagacgacagacgatacatgaatcggtaatgaacataaatggcgggtgtcttccctatacttggggagtcacccgcttttcgtatacgaccagggagagccatgaataaggccatcatcaccgtcgtcggtcaggataccgtcggcatcatcgcgcgcgtctgcacctatctgtccgagcacaacgtcaacgtgcttgatatttcgcagaccatcatcgacggatatttcaacatgatgatgattgtcgactatgccaatgcggacaaggactttggcgccatggtcggcaaccttgaggatcttggcgacgacatcggcgtgcgtatccgctgccagcgtgaagagatcttcaccaagatgcaccgtatctgattctgatatagctttcgattccctcccgctggcgggaggtggcgcatagcgccggtgggtggtctcatgttggataccaccccagtcggtttcaccggcagcccccaccagcgagggcgaaaaaacaaccgtaaggaacacaccatgctgaatatcatggaggtccacgagaccaatcagatgatcgagcaggagaagctcgacgtccgcaccatcaccatgggcatctcgttgctcgactgtgcgacggacaacgtcgacacgacttgcaacaacatttaccgcaagatcaccacctacgccaaggatctcgtctccaccggtcaggccattgagcgtgactacggcatcccgatcgtcaataagcgcatcaccgtcaccccgatttcactggtgggtgccagctcctgcaagacgagcgaggatttcgtcaagatcgcgcatgcgctggataaggcggccaaggaagtcggcgtcgacctgatcggcggctactccgcgctcgtttccaaggccatgaccccggctgaggaactgctgattaagtccttgccgcaggcgctttcagagaccgacatcgtgtgctcgtctgtgaacgtcggttccaccaagaccggcatcgacatgaacgcggtcgaactgctcggccacatcatcaaggacatctccgagcgcaccgccgacaacgactcttacggctgcgtcaagttcgtggcgttctgcaacgtgcctgacgacaacccgttcatggccggtggcttccacggcgttaccgaaggcgacgcggtcatcaacgttggtgtctccggccccggtgtggtctcccgcgcactcgatgcggccaaaggcaaggacttcgagttcctgtgcgagaccatcaagcgcaccgcgttcaagatcacgcgcgtgggccagcttgtggctcaggaggcttcccgccgtcttggcgtgccgttcggcatcatcgacctttccctcgctccgaccccggccgtgggcgactcggtgggcgaagtgcttgagaagataggcctcgaacaggttggcgctcccggcaccactgcggccttggccatgctcaacgaccaggtcaagaagggcggcatcatggcgtcctcctacgtgggcggtctgtccggtgcgttcatcccggtctccgaagacaagaacatgattgacgctgccgcctccggttgcctgaccctcgagaagcttgaggccatgacctgcgtatgctcggtgggtcttgacatgatcgccattccgggcgatacctctgcttccaccatctccggcctgatcgccgacgaagccgccatcggcatggtcaaccagaagaccactgccgtgcgtgtgatccctgtggcgggcaagggcgttggtgaaatggcaaacttcggcggcctgatgggctacgcgcccatcatgccggtcaaccagaccagctgcgaggccttcgtgactcgtggcggtcgtattcccgctccgattcacagcttcaagaactgattcagtagggtatctgccttcaaagaggtacctccggctcttcgcggagagctatctgctttcagagaggtacctatgtacggaaacctcgagtatgcgcgttggaatatcaacgcccatactcgaggtttcttaattgagatacccctttgaaagcagaacgcattctgcaaaagcccgaatgcaccccctcagaaggcggatatcgatttggatgacctttcgagaggtctattcccgtttcgaggggctgatctcgatctttctggaggtctacttccgtttcaaggggctgatatatgcgaagaccccgagtacaagcgttgatatttcaatgtctgtactcggggtttcgtcctttgacagccccttgaaacggagatagacctccggtggatgccgaatcagcccctcaaagcgccgatagacccattttctgcgttcatttccacaatgatggtcgtgctgcgaggctcagggtttcctctctcacgccggtcggcgttcgttcgtcgtcgctactcgaaggcccaccgggccttctcctcacgctccgtcctgcaattgtggtctcgctgcgcgaggtttgatgtttcctctctcacgcctgtcggcgttcgttcggcgtcgctactcgaaggcccaccgggccttctcctcacgctccgcccttgaaattcagttggcgccaggcttcgtagatggcgatggatgcgcagttggtgaggttcagggatcgcagggacgggcgcatgggcagtcgcacctgctcggccacgtgcgggccttccatgatgtccatcgggtcggggatgtcgccgggctcggggccgaacagcaggatgtcggtcggcttgtattccacttcggtgtacagcttggtggcatgtgcggtgaacgcgatgatgcgcgaattgggcatggactccaccaggttgtcgaaattcggatgcagcaccacgtgggccatgtcgtggtagtcgaggcctgctcggcgcagcttggtgtcgcgcaggttgaaacccaacggctccaccaaatgcaggatggtgccggtcaccgcgcacaggcggatggccgagccggtgttgccgggaatacgcggtgagtagtagcacaggtgcggtgttacggtttcggtggtggcggccttttcagccgagagcatcgcgtccaccacggagatggggttgccatgcgcgtcggttacgagttcgtccggtccgtaattcgatttacggtacccgtactcgaacatcttctcgacttttgtttcgggattctgcgcgttctgcgaattctgttctgcctcgttcgtcatagctgctaagaataagaacgatgaacgacacagcaatttctttacggctcggcgcatggtgggaggccaatgcgcgtgacttgccatggcgcttcggacgggccacgccgtggggcgtgctggtcagtgaggtgatgagccagcagacgcagatgagtcgtgtggtgccgtattggaacgattggatggcacgctggcctgacgcccgtgctcttgccgcagcacctaaagccgatgtgatcaccgcatggggccggcttggctatcctcgccgtgcgctgcgattgcaggaatgcgcccgcgtggtggcggaagaatatggcgatgagctgcctcgcacctacgacgagctcgtcgctctgcccggtatcggcgactacactgcctccgccgtgctgagctttgcattcggtgagcgcattgcggtgatcgatacgaatattcgccgcgtgctgagccgcgtattcctcggcaccgaatctcgcgggggagcggcgagcccggccgaacgcgcgctcgccaaccgcatgttgccccaagacagggtttgtggggacggtgccgattgcacggaccatgcataccgatccggcgaacacactttcctgcagtgcagcgaacctccatcggtcacgtggaatcagtcggtgatggaattgggcgcggtggtttgcacagccaagacgccgttatgcgagatttgcccgattgcggatgattgtgcatttctcaaagccggccgccccggactgggggagcgccgcacccgcccgcggcagcgattccaaggcactgatcgtcaggtgcgcggactggtgcttgcggtgttgcgcgcattgccggcgaatgacacgcttgccagagtggatgccgaaaacctatggaaagaccagattcagctcgactcctgcatcgcgagccttgatgatgacgggttgatcgagattctggagaatggtgcccttcgtctgccccacgactgattccgcacagtgctatgaagtggttgaaccgcacacgtgtgagagcgtacgcgtggatgagcggatgatatcgctgagcggaatattggtcttggctgacattctgtgaaaatatgggactgccgtgcgtgcatggcgatgacgaccgtacactgaagaggttatggcagtgcagaggaataagtcaggtgcgaatcctaaaagcgccggagatggtcgtggcgggtggagccgtccgatgtctcgcggcaaaaacacctctcgcaagtctgcttctcggaagttctccaatcctgttcgctccggtaggactgtcaaaaccgcgatacctgcaaagaccatccggcctgccaaggcaggtgctgtcacaaagcgcaccatcagtaagaagaagcaggcgatgtaccgtcgccgccgcatcgtggttggtgtggcattggtgttagttctcgcgttaatcgtattttgcgtctacagccttggccgtggtgtcggagccatcaacacggcaattcatcatgacgaggtgtatgccatttcccgcgacaccgtgccgacgccgaagaaaaccagcggcgttaaggattgctcggccaaggatttgtcgcttgatctgagctcggcgtcccaatccgtgccggttggcgggtcattggaattcaccgccaagatcgtgcatgacggttccgacagctgtctggtcgatggatccgatgcgggccgcgtgctcaccattacttccggtcagcaaaccgtctatacctccgccttgtgcgccacggattcccgcatgctgttgatggccaagggagacaaagacattcagcagctcaaatggaatgccgattccaatgccgcgctgaccgagtgcacggatgaggcggactggcctcgcgtgaacgcgggaacgtatgtggctcagctgagtctgaaggatcatcccaaggtgaagagcgatccagtgacgtttacggtggagtaattggagggggctgctccgggcttctctccaccctcgcccgtgtgaggtcggcctcggtatcagcgggaagtcgcgcaaaagatgtcctgctatagcgttattcttttgacttcgcatgaggtgtgtcatattgcgggcatgccatcgacaatgaagcgtccgcataggcatatggtggccatgccggcgctcccaggggaattattaatctaagcgagcgataaggaacgtccattggctactgagtctacgacgaacaccaccaccatcatcgcacgcgccgaccagcatgatattgacctgcacaaggcgtcggatcgcgtgaacttcggttccatcaaggaacccatcgatgtgccctacctgctgggcgtgcagaccgacagcttcgattggctgatcggcaacgaacgctggaaggcgcgtgtcgaggaggacgaaaagaacggcactaacaccgtggcccacacctccggcctcgatgaggtcttcaacgagatctctccgatcgagaacttcgctcagaccatgagcctgaccttctccgatccgtacttcgaagagccgcgtcacaccgtgcaggaatgcaaggagaaggattacacctactccgcaccgctgtacgtgaacgccgagttcgagaacggcgacaccggcgagatcaagtcccagaccgtgttcatgggcgacttcccgctgcagaccccgcacggcacctttatcatcggcggcaccgagcgagtcatcgtctcccagctcgtgcgctccccgggcgtctacttcgatcgtcagcaggaccgtacttccgacaaggaagtcttcggcgcgaagattatcccgtcccgcggcgcatggcttgagttcgaggtcgataagaaggaccagccgcaggtgcgcgtggaccgcaagcgcaagcagtccgccatcgtgttcctcatggccatcggcatgaccaagtccgagatcgccaaggccttcaaggactacccgctggtgctcgatgcactcgagaaggaaaccctcgagacccaggacgaggcccttgttgacctctaccgcaagattcgtccggctgacaccccgacccccgaggccggcaagaacctgctggactccttctacttcaacaccaagcgttacgatctggcccgcgtcggccgttacaagatcaaccgcaagctgggcgttgaggccgacttcaacgaccgttccctccaccaggaggacatcatcgccaccatcaagtacttggtggccctgcacgatggtgctgcgaccttcccgggcaagcgcaacggcgaagatgttgacctgcgcgtggacgttgacgatatcgaccacttcggcaaccgtcgtatccgtcaggtcggtgagctggtccagaaccagctgcgtaccggtctgtcccgtatggagcgcgtggtacgcgagcgtatgaccactcaggacgccgaggccatcaccccgcagtccctgatcaacatccgcccggtgaacgccaccatcaaggagttcttcggcacctcccagctctcccagttcatggaccagaacaacccgctgtccggtgtgacgaacaagcgtcgtctctccgctttgggccccggcggtctgtcccgcgatcgcgcctccatggaggtccgcgacgtgcacccgtcccactttggccgtatgtgcccgattgagtctcctgaaggcccgaacatcggtctgattggttctctggcaaccttcggccgcgtcaacccgttcggcttcatcgagaccccgtaccgcaaggtcgtcaacggccacgtgaccgacgaggtcgagtacatgaccgctgaccgtgatctcgaccacgtcatcgcccaggccaaccaggaacttgacgagaacggcaacttcgtctccaagtccgcccttgcccgagtcggcgaggaagaggcagtcgatgtgccggtgagctccgtggattacatggatgtctccccgcgtcagatggtctccctcggtgcctccctgattccgttcctggagcatgatgagggccaccgtgcactgatgggtaccaacatgcagcgtcaggccgtgccgctgatcgaatccgagcgcccgctggtgggtaccggttccgaatggcgcgccgccaacgattccggcgacgtcatcaaggccgacaaagacggtgtggtcacctacgtgtccgccgacctgatccgtgtgatgaacgacgacggcaccaccagctcctacaagctggctaagttccagcgttccaaccagaccacctgctacaatcagcgcccgatcatccacgatggcgagcgtgtggaggccggctcggtgctggccgatggtcctgccatccagaagggcgacctggccctaggcaagaacctgctcatcgccttcatgccgtggaacggctacaactacgaggatgctgtgatcatctcccagcgcctcgtgcaggacgacaccctctcctccatccacatcgaggagtacgagatcgacgcccgcgaaaccaagctgggcgccgaagagattacccgcgacctgccgaacgtcggcgaggacgctgtggccaaccttgatgagcgcggcatcatccgcatcggcgccgaggtcgaggccggcgacattctggtcggtaaggtcaccccgaagggtgagaccgagctgaccccggaggagcgcctgctgcgcgccatcttcggcgagaagtcccgcgaggtgcgtgacacctccctgcgtgtgccccacggcgagaccggtacggtcatcggcgtcaaggagattacccgcgaggatgccgaggaggacggcgacgagctgcccaacggcgtcaaccagatgatccgcgtctacatcgcccagcaccgtaagatcacggtgggcgacaagctctccggccgccatggcaacaagggctgcatctctcgcatcctgccggaagaggatatgccgttccttgccgacggtactccggtcgacatcatgttgaacccgctgggtgtgccttcccgaatgaacctcggtcaggtgcttgagctgcacctcggctggattgctcactccggttgggacatctctttggatccgaatctggaagccgagtggaagaagctgattccgtccggtgccgagaaggccgagccgaacaccccggtcgccaccccggtgttcgacggtgtcaagccggaagtcctgaggggtctgttgtccaccacgctgccgaaccgtgacggcgaccgtctcgtgggccctgacggcaaggcgactctgtttgatggtcgtaccggtgagccgtacaccaagcagatttccgtgggctacatgtacatgctgaagctgcaccacctggtcgacgacaagattcacgcccgctccaccggcccgtactccatgatcacccagcagccgctcggtggtaaggcccagttcggtggccagcgcttcggcgagatggaggtgtgggcccttgaggcctacggtgccgcctacacgctgcacgaaatgatgaccaccaaatccgatgacgtcgacggccgcgtgcgcgtctacggtgccatcgtcaagggcgataacctgccgccggcaggtatccctgagtcgttcaaggtgctcctgaaggaaatgcagtccctgtccctgaacgtcgaggtgctcaacgccgaaggcgtggccatcgacatgaaggacgaggaagacgatccggtgagttccgccgacgatctcggcttcaacattggtgcccgccccgacgcggccgccaaggaagaccagaaggccgaagaacccgaataccagtgattccacgggttgtcgcctgccgcgcctagagcggcgggcgacaactccacacagcgtgaacgaaaacttttaacagaaacggattaacaagtgctggacgtcaacgcatttgacaagcttcgtatcggcctggccaccgccgacgatatccgcggctggagccacggcgaggtcaagaagcctgaaaccatcaactaccgtactctgaagccggagaaggacggtctgttcggtgagcagatcttcggtcctacccgcgattgggagtgcgcctgcggtaagtacaagcgcgtgcgcttcaagggcatcgtctgcgagcgatgcggcgttgaagtgacccgtagccgcgtgcgccgtgagcgcatgggccacatcgagctcgccgctccggtgactcacatttggttcttcaagggtgtgccctctcgcctgggctacctgctgaacgtcaccccgaaggatctggagcgcgtcatctacttcgcctcctacatggtcaccgaggtgaacgaggacgagcgccacaacgatctgcccggtctgcaggacgagttcgatgccgagatcaagcgtcttgagcagcgtcgtgacaccgagatcgaggctcgagccaagaaggttgaggaggacctcgccgctctcgaggagaccggcgaagccaagggcccggctcgtgccaagctgcgcaatggtgccgagcgcgagatgactgccatccgcacccgctataacgatcagatcgcccgcgtggacgccgtcttcgacaagttcaagaagctcaagcccggcgacatggtcgacgatgtggatctgtggcgtgagatgcaggaccgctatggcgattacttcgacggctgcatgggcgccgaagctatcaagaagcgtctgcagtccctcgacctcgaagccatttccaaggaactgcgcgaagagatcaaggacgcttccgagcagcgcaagaccaaggcgctgaagcgcctcaaggtcgtcaacgccttcctgaccaccggcaacaagccggaagccatggtgctcgacgtgattccggtcatcccgccggacctgcgcccgatggtgcagctcgacggtggccgcttcgccacctccgatctcaacgacctctaccgtcgtgtgatcaaccgtaacaaccgtctgaagcgcctcatcgagctcggtgctcctgagatcatgctcaacaacgagaagcgcatgcttcaggaagccgtcgactccctgttcgacaacggccgtcgtggtcgcccggtcaccggtgcctccaaccgtccgctcaagtccctgtccgacatgctcaagggcaagcagggccgcttccgtcagaacctgctcggtaagcgagtcgactactccggtcgttccgtgatcgtggttggtccgtccctgcgcatgcaccagtgcggtctgccgaagccgatggctctcgagctgttcaagccgtttgtgatcaagcgtctggttgacctcaactacgcacagaacatgaagtccgccaagcgtcttgtggaccgcggcgactccgaggtgtggggcgtgctcgaggaggtcatctccgagcacccggtgctgctcaaccgtgcacctacgctgcaccgtctgggtatccaggccttcgagccgattctggtggagggcaaggccatccacctgccgcctctggcctgcgccgccttcaacgccgacttcgatggtgatcagatggcagtccacctgccgctgagcgccgaagcccaggctgaggcccgctcgctgatgatggcttccgacaacatcctgaagccggccgatggccacaccgtgaccatgccttctcaggacatgatcctcggtctgtactacctgtccaccgtgctggaaggcgccaagggccagggccgcgtgttctcctcgctggaagaggccgaaatggccctcgaccgccacgagatcgacatgcaggccaaggtgctcatccgcctgcctgagaccttcgtgctgccgaagaactgggagcccggcgaggtcaaggtgctcgccccgcgcgacggcgagaccgacaccgccaaggaagagcgcttccacgacggcaccgtgctgttcgccacctcttacggccgtatcctgttcaacgagaccctgccgaccgactacccgttcgtcaacgatcaggtggccaagggccgcctgtccaagatcgtcgatgacatcgccatgcgttactccacccagcaggtggccgccacgctggatgccctcaaggatctcggcttcacccgcgccccttggtccggtgtgtccttcgccttctccgacgtgaacgagccgccggagcgcgacgagaagatcgccgagtacgaggccaaggccgacaaggtcaacgccaactacgagatgggtctgttgaccgaggaagcccgccgtcaggagctcattgacctgtggaccgagtgcacctccgaggtgtccaaggaagtcgaggacaagttcgacccgacctccaacctggccatcatcgtgcagtctggtgcacgaggcaacatgatgcagatcaaccagattgctggtatgcgaggcctcgtggctaacccgaagggtgagattattcctcgtcctgtgaagtccaactaccgtgacggcctgtccgtgctggagtacttcatctcccagcacggtgcacgtaagggtctggctgataccgcactgcgtaccgcagagtctggttatctgacccgtcgtctggtcgacgtctcccaggacgtcatcgtgcgcgaagaggactgtggcaccaaggccggtctgccgattcgcgtggccgaccgtgacgccgatggcaacctggtgctcgttaaggccgccgatggtggtccgtactcccgtctgctcgctgccgatgtcattgacccggctgacggcaagaccgtgctgtacaagcgtgacgatgccctgtccatggacgtgctcaacgacctcgtggcccatggcgtagaggaagtcaagtgccgttccgtgctgacctgcgagtccaagcgtggtgtgtgctccaagtgctatggctggtcgctggccaccaacaagctggtcgacgttggcgagaccgttggtatcgtcgccgcccagtccatcggtgagcctggtacccagctgacgctgcgttccttccactccggtggtgtggctgcggcttccgatatcacccagggtcttccccgtgttaccgagcttttcgaggcccgtaccccgaagggtgaggccccgattaccgagttcgccggcaccatcaagattgtggagaacgatcgcggtcgccagatcatcctgagcccggatgctgattccggcgctccgaccgaggacggcgccatcaagccgattacctaccaggtctccaagcgtgtgccgctcaaggttgccgatggcgaccacatcaaggttggcacccagctggtcgagggttctgtggatccgaagaagatcctcaccattctcggcaagcgtgctgctcaggtgaacatcgtggaggaagtgcacaccgtgtaccgctcccagggtgtggatatccacgacaagcacatcgaggtcatcgtgcaccagatgacccgccgcgtgaccatcatcgactccggcgacaccgatctgctgccgggtgagctggtggacaacgcccgcttccgcgagatcaaccgcaataccgtgaagaacggtggcaagccggctgttggccgtccggcgctgatgggtatcaccaaggcgtctctggccaccgattcctggctgtccgccgcctccttccaggagaccacccgcgtgctcaccgaagccgcgctctccgagaaggtcgatgacctcaagggcctcaaggagaacgtcatcatcggtaagctcatcccggccggtacgggtcttgcccgttaccgcaacgctgtggttgagcctgacaaggccatccgcgacaccatctacccgaacttcggtctgggtggcgatggtgatcttggcgacacgaccttctctgacgccgacctgtctgacctgaacttctcgaacctcgagttcggcgatctgaagctcggcgatgacttcaacccggatgatttctattccgatcagggtggtcagggcgacatcgaggagtaatcacttcccgatggctgtgatccagccgcgtatgaatatgagttcatgcgcatgattgacaggcgatggcccggaactggtatggttccgggccatcgcctatttgcggcttggatctgcgggcctcgtgttctgggactggtactgatgccggttgtcgcggcttgcccgacttgggcgagatgcggaacttgtgcggtgtatgcggcctgctgacccggttttaagtatttcggcgcgagatggagaacgagattgacaaggtatgcgaacggtcactcctcgcaaggacagttgcgttctaaaccgcttgagacgcggcatggatcgcagcatggcggtacgcagccgtttcacgctggtccaatattgagtggactgtgcgggtgtgatattccgcccggaaaaagtggcatagtcggcctccctgccaagttgctgcaacgcctgattggcgataccaaactgatgagcgatggcatgcgcttgattacgcctggtgccggaaagtggcatgccgccgctttgtaccgccaaggttcgcagggcgttccatccggcggctatacgtgtgcgaggactgccgcgccgttgcgcgagggcaatcataagggctttgaacgccagaatcaggacacaaaccgtcaatgtaatccacaacgggctgctatagatggctgctgtgcgcgctgctcgatggaactgtaaccagaacgattcatcagatgaagcgacttcggcatccgtgccggataaagcactctgccctctgacctgagtctggtctcgtaacggatcgatgaatggaacaggcggttggcgcacaagattcttcgggtcaggtggagccgagctctggctatcatccggaactttgctctccttcggagtagggtagaacgccacccatcccagattgcgaagtttgatttccacccatgcggttatgtcgtcgccggtgaaagtgatctcggtgccactgccagaagttttcttgccacgcgcgttggtgatgtctccatcctcgtctttgggcaggaatcccaataccacgcgggaaggcagtcccaactcacgggccatcagggccatggcggaggcgtattgttcggagtctcccaccatggtggttccggtaagcagtgtgtttacacggtaattgccatgaccggcagccgaaggatagtcgttctgcaagccgtgggagaaccagccggagctccgcaacattgcagccaaatcttgggctgcggcacctcctcgggattggccgccggcagcggccgaagccagtgtgctaactgcattgggcacgtccagagctttcggctggctgatgttggcggctttggccgtgctgatttgttggtcggtaggggtgtcggcaataatgccggattcgatgtaagtcagtccttcgctggttcctgaggggagtatggctgaattggtatcgcggttgtaatagaacgggctgttctcatctttgccgaggaattgcacgccggtggcggcgccagccaggggaagccagacatcagcgagtcctcggtgcacagtgaaggtggcggtgaatgccatgccgcgttcatcagtgctgattgtggtgcctactcgttggtagttcgcgcaatcggaggctttggatgagtcggagagattccatactgagccgtcgaaccagtccatcactgccagtctgacgggagtgccggcaggcagattggtgatggtaagtagtgtgtcatctcgatgatccttgatataggatctcatgctgctcaacgggctggtgtaatcgtaggggctgagcggtggattgtacgtgtctcgcagtatgaggcggtgcggggacgccagtgcggaaccgccgacggccagcccggctgcaagagtcaccacaaccagtgcgcagaaccatcgttgccattccataagttccaatcgccatgccatccagatgatgagcagcacggcgaaggtgatgccgcatagggttcgatgccagccgtggctggtgccaagcagtgcgcatacggccatggctgtggccagtggaatggctgcgattgcggacgtccacgcatggtcactgatggcgaacgtgcctgccaggaacgccagccataatccgatagtccatacggccatcagactgccatatgcggtgccgaccggcggtgccaccgaaatgagatatttgaatgctccgaacgtcatctcccatccctggctcaaggtatccaggctgggtatcacgtgagcgatggtggtggaaggcagtgctatgactgggccgatgatgaattgggccaacgccagaaaggtcagctgccaccatattgtgagtgagtatctggttccggcgaatgcgatcgccgtccccagtgcagtcgaaggaatggctgccgcaatccacatcatatggtccgcgtacacgtcaatgaggttcgattgagccagaaccatcatcagcgcaatagcggcaaggctgatgccctgttgtttcttggattgtctggcaatcatggcacaactcccaacatgagtggcagatcgttgagcttgccgatggtgattacagtgcaattggcgcatcgccttatgctgcaggtcatgccgatatctgcctgcagcactatgcaacgtgccgattgggggagtgccctggccatgcgtgttatgcggctgagggttttcttcgatccaacggtgacgacatacagggaagcgttggcgctgtgctgcaatgtgccatcgacaaggctcgcggtgaagtcttgctggaaggctatggcacttgtggcgtcaagaaacgacatggcgtcatgcggctgcgtgtgtgctttcccgacatgcacatataacgggcgatattgcagcaggcattgcacaccaatcgaagcgtgaatagaaaccgccatttcgaattcttccctcgaagcgtagtcgctttcatccacgctgagcgttaatgaggtatcagtgcggcatgtggcttcatattggcgaatcatcaaggaatctgctttggcggagcttggccaatggacgttgcgtatatcgtcgccgggctggtatttgcgcaggccatggaaatcaatatcatcgtctgcgattcgtctggaagattgaccttcgagatcgcgaggaataccggcgtgcagtaggggcagccgcacgattttcggatggatatacacgttgatgcgttctgccagatcgttttcatggcgggtaagaccgaatggatcgcctttgcgaatgtgcaatggtccaataggcaataccgtccgggctggggcatgaaactccatgctgatgtgcttggtctgtttgggcaggagccgggggatgctgaatcgatggcggtcattgccgatgggaagaccgccttgggtgttggtggtgggtgctgtgccggagttgctgatgttcacggtgatggatgttgtgccgtccacggtgatacggtgccgggaaacatgaatgctggcatcgaatttggtgttacctagagcaagcaggattgcgcagagcatcatcgtcgtggatgctatgccgaatgtgagcagttcgatccaacccagcaacgggaatgcgcacaagcatgctgtgccgcagcccgttgctgcccaacccagcggggaaacagaggaagtgaggcaatgccggattcgtgcagtggcttgtctgcatgcttggccgagctgacgtgtgtgatgcgcaattcccccgctgtgcttcgcctcggttttgttgtcgtggccgtactgacgtgtgtgatgcgcaatggtgacggatgggccggtcatgggcatggtcctttcacgtgctgacggtgggagccggcacctcttcaagaatctcctcaatgaggctttcttgggtgatgccgtcgaaaatggcttcggggaccagcatgatgcggtgggcaagtatgggcgtcgcaagatcgttgacgtcgtctggcactacgtagtcgcggccgtcagcggcggcccagatacgggcgcagcgtgccaacgcaagagcacctcgcattgaggagcctatggagatactttcgtgatggcgggtcgcttcgaccagacgcacaatgtattcgtggatggcgtcgtcgatgtaaatgccagcagtcatgaggcgcaattgcagcacgtcatggctggtgagcaccggggagacggtttgtgcgcggtcggggatgtcgatttgtttgagtatgtcgatagacacctgttggctcgggtatccgatcgaggttctgataagaaagcgatccatctgggcttcgggcagcttgtaggtgccgagctgatcgaccggattctgcgtggcgatgacgatgaacggttgaggcacgttataggtggtgccgtccacggtgacttgctgctcttccataacctccaacagggcggattgggttttcggcgaagcgcggttgatttcgtcagccaatacgagagatgcaaagatcggccctttgcggaactcgaactcgtggtgctcctgatcgtagaaagtcacacccactacgtccgaaggcagcagatctggcgtgaattggatgcgcttgaagctggcgtcgatggaattggccaaagcccgtgccagctgggttttaccggtgccgggattgtcttcaagcagcacatgtccaccggccagtaatgcggtgacgcattgtttgatcggtgtggtcttaccagccactgcaatggcgatgttctcgaccagcgcattgaatgactgctgaaaataatgtatgtcgggtgttgcttgggcggcagtctgagcgaatgttccagcatgagaggttttcggacgctgggttgcatgcgatattggcttgaactgttgaagactgatattcgtgtcgtcacaaggggcttggtgctctaactcgggtggatagagagtttgtgccaattgggtgtcgtccggcagatatacggcatgcgatatccgagtggcgtctgaaagatatgtggcgtcatcgatggtggggttcatggtgttctcctgcggggtagtggattgagtgaagtcagtggacgtgaatgtggccgtagctgtggcgggtttggcatcgcgtgagggaataagagtggctgtgacggtgatctcgtcagcactgtctttctgattggatatatcgaagccaacagtgccgccggaacatccgatggtgtctgctgcggccccgctcaactcgatgcgctcgcacccggcgttgcgattattacccggcgtgattgttactgctggtatgtcatcatcggcaagctcaatggatggagcatcggggtcaccccagatggccttgggctctgaagtcccggattccgggctccagccagctctgttatgtgctttgaccgtagccgttaccagggtcccgtcggagatgctgtcgttgttgaagatgaaggatagtttggtcgttgtatttccggtctctttggtctgcaatacgcccacgccgctgaccgtcaccatgtaattgtcaacctcactgaaatcgccatctatcgggctccaggtgatggcagctctggcattgcctccttccacagtgacattcacgggagctgtgggagtcttgtctggaatggcggtgacggctgcggaggccgccgaccagccgacatcgttgcgggcggagagagtgaaagaatatatcctgccgttcttcaaaccagtgattcggcatctggtggacgtgccacaggattgctctccgttgctggcgccgctccatctcacccggtagtcggtaatggggctgccgttggccgcacctgctgaccaattaagtgtcaccataccatcctgcgggtcgccggctatgggaaagagcagcggagcatcaggcttgtcgactatggaaagggtgatggtgccggtgacttcgcgtgctatggccgtagtgccgtcccgcacggtgacgagcaccatgtttgaagaagctccgatgttgggcgaggcgctgatggtgatggctgttgaagagcagctggttatcgtgattttcgctgtgtcatcggcttgacatgcggtaacggtcagtggggaatcagggaacggattgtaagcgttctccaacggattcactgagccggaggagccggctttgagctgcaatgttgcggctgcaagtcgtgctagtggacgagtggattccaccacgcgaaccatcacgccggcatgcaccgtgcccttgccgtatgtgatgtgcacgggaatagaggcggtggctccggcgggcgcatttttggatgccgagatatgcagcttgcctgagctggacaacgaggacaagatatgctccgaagaggttccgcctgaggaatagacgtatcgtttctcgtcgtcatggagccctggaggcgtgtgggtcagtgcggtcagatcaatggttttcggttcagcgccggcctcgatgtcaatggtgggtgaggaaaaggtgggcggtggtgttgttctgccaagtaccgtgatcggcagagtgaccacggctgtattgatgattgcggaggcgtcgggccggtttccatccgtcacggtgaaggtgattgaagctgggccggcatagtctttgatggcggtgaatttcagggttttgccatcgacgcggaaatcggtgttggacgctttggtggcggtgatggaatcggcgctttcgaggtacggttcttttccggctcctacacgcacatagtcgttgatattgatgtgaacggtctggcgcgcgttgactatgatttccggtgccttggggcgcagcatgggtggaaacacgccatatgccggcacatgaataaaagcagtggacgtgacatggtgcgtggtgttggtcaccgtatacggcacggctctcgcctgcgaggtcaaatcaacggtgacgatggtggatgcgctgccttctccgactctcgcatggtcggtggctgagggatgtatggccacttccagttcgctggccgtgcctgaaggattggcgatccatggcgagacgtccacgtccacggattgcttgtcgatggtgtcggcggccggcacgcggcagtcataggcggtaggtggctcgatgggagcgcttggatctacgttgacggtgagcgtggcggtatctgccagtccggccgtgttgtacgcggtatacgcgatatgtgcggtggtggcatgctcgggtgtggtgaatagcagcatattgttttccaccatcacatcgtcgattccctgcgcttcaaccgtcgtgccgatggtcaaatcggtgttgtccgcggagatgtcgttgagcgttaccggcacgctggctgatgtattgggccgtagtgtgatgtcgtcatcgcgcgcatggacgctggattccgatgcgccctggaacacgcccacccgaatctgtgcctgcgctcgctgcccggtccaatcctccacggcataggagaatatgtcggttccgcaagagtccggatatgcctcgtaaaccagatagtcggagccgacttcggcaatgcgccctagtaccggcgctgtgttgcccaatcccagcagctggtcatcgtcgccatccacgtcgatgccggtcagcgtgatgggaatgcgtacggtttggcctgcagctacttgtgcttcagtgttgtgcggtgtgggtgcggccttgtttccagcttggctttcatgcacggtgatgatgacgatgccggatgccgcattgcctgtatggtcttcaacggtgtaggtgacggggaagacccccgcttggctggatgcctgatatcgcacgatgctgccagacgtgaacaccagacccgcgaaggtgctttcgtcgtattgcagattgtctttgagcgtgatcgtagtgctgtcggagtatgtcacatggttaagtacgtctactgatacgatgccgccagtacgtacctggatgttgatgtcacctgctgtgggcgtggagctttccgccgccaacgccggtggatgcaacacaatggtgcctgtggcggtgccagccgcattggccacgttgtaacgaatgggaatgggtttggacggcacttggtgtgctgtgacatacacgcgtttatggtccaccaatccggctttgatgccggagtcggaaggaacgtccaccgaggttacggatagcacgccacccatagggtcgatgtcatttgacagaggctccacaatcgccgtattgtcagtgcccagcagcgccacatcgttggccgccaccggtttggctgttgctttggttacggggtgcacatccacgcgagccaaaccggtggccggtatcgagccttggagtatggtgtacggcacatagtaggtgccgggtttggatgccgtgaatgcaatggacaaatcggacgggtgagcgattgtggaagcgccggacagcgtattcacatggctcagctgcattggctgcgtggaggtgccatgcacatagggcttgagctcgatgacggtatccgtatccggggtggtggccacggctattggatcgatgaccgcgggcaaggtgttcgccggtttgacggagaaatacatgaacccggtgccggtggccatgccgtctgagacggtgatctccactcccacgcggccggaggtcatatcgccggcattgaaggtgattttgccatcaggccgggtgaaaacctgcgccttatcggtgtattgcacgactgcggaaaccaaggtaagaggatccccatcgggatcaacgaagctgccaagcgcattggcgacgtaactggccccctgctccacattgatttcagatggggtgtcggattgcaacggtgtatggttgtctccatcgtgcagcgttaccgtgacgttggcggtcgaggtctgaccccgaccgtcggagatatcgtaggcgaacgttacggttccggccgatgctgcggaagcatcaagctgcagataccgcccggcatagattggcgagacggtgacgtcgcctccttggggcgcgcctactctgatgatgttcaataccgagcagtcggtctgttcgtcattgcgcaatacatcaagaatctgctcggatccagcgcgagctccgaatgcgtcatcctcggctttgatgtcaccggattgctcggagcaggtttccgagaaatcctgatggttggtggcggaatcctcgttccgttgggtactgtcatggtgctgcgtctgaatctggttccattgcatggcgatgaccgcagtgctgtcatctggattccagacattgccctcgatcacatcgttaagcaccgcaacccgatgattggtgcggaacaccagttcagaggtggcgtgtatcgattcaagcgtttggaatgcgatatgtgcactatcgggagtacaggttctgatgtaattgcgagcctgttggctccatgccgcgtatatgcacccattcacggaaaccggacgagccgcctggctcgtgccgccagtcaagtggaatataggtttggcggtggaagaaagtcgtactattgcgagcccgcgtggagatgaggctgccacccaatcgttctgattgccgtcaacgggcggactctggagcgtgagtgtatctgaggcttcgatggtggtctgcccggaggcgtgaatgatggtattgcccgatgagattactggaacgccgccgatgacggtgaagctatcggctgctcgcggctgcccatccgtcaaggattcaagctgcttgatctgggaactatttgggctgtccaaccgaaataccacgccgtcacgggggcggtatccatagaccgctccatcgtgggtgactacgatgcggcctcctgtgccgagtctcatgcgcgggctaccgacggaaggcgacaccgcatcgagttcgtcggacgatccgacccatacgttgccggtgttctcgttgataaaggcaacggtgcttccgcctactgaggcggtggtatgtgccttgaggctggtctgcatactggtactgagcgtggaagatgcaatggctgaagccttagtgggctcggccaaaatggtggtgccgttatgctgtgcgatgtcgaatcggggtgaagacgagacgacacttgcatcagcctcacggttcttgacgttgaaacgggcggctttctgattggcgagcgacgtgacccatacggtgccgtcatccagtcgcacatgatgacgtgtgacgatgctgatcatgaccgccccggcaatcagcacggtgagtatgagcagcgtgaatgcaggaaccgcccacgtgtagttgtcggaggacggatggccgtgcctggcattcctgatgcgatgaaagtcagtatgcgattgtgatgacgtgcccatgattctcccttgaatccttgccattgtgtgctgccccattgcagctgctatatgcgagactcacctgaatggtggtggatccggtgatgctatccatgcgtggcagcacggcacagacaaacaccagacacacggtgaccgctgtggtcgcaaccccggtcgcgataatggttggtttgacccaccggcgctgggtccgttcgttatgaaggtcgggttctcgaggacggcgtagatgagcaatctccttgggatatggcggtacgccatcaaccataagaggtgtgatccggccgaagaacgcatgctgggcgtgctgcatggctcgcgcgaattcgagcacggaataataccgcagatcaggattcttggcgagggacttgcgcagtatctgttcgatgttcgtcggcacgtcggcacggttgatgcggggcagcggttggttgagaatcagacgaatcaactctgattgcgtgtgtggatgatattcatgttgatagggtgagcagccgacgagtagcgcgtatagtgtggctcccaatgaatagatatccgctcgttcggctccattgcccatatgcagcagcacttcgggaggtgcccaaggaggggaacatccggtttcggtgtggtcatacgcgtcagtggatatgccgaaatcactcagtgccggcaggccttgcccggtgatgagaatattgctgggcttgatatcgtggtgaatgatgttgctgcggtgggcggtaccgagcgctccagccaatttgattcctaggtccaatacctgagcacatgtcaaagaacgggatttcatcaaaggttcgtaagtaccgcctggcgcatattcgagaatcatatagccgtgaccgtcggcggtgacgtcggcgtgatacaacgtcagaatgtagggatgctcagagagccggaccatggcggcgttttcccgatggaactgggcggcaatgccacagtccaatgtctgattgctgacctttaccgccactggatgagcggacgtatgtaggcggtataggtacaccgttgcggtggtgcctgtgccaagtgtccgcacgaaatcgtatcccgacaggcgcggcggtgcatgcgaaatgatagccatgagagcccccccaaaaaattatcctcgttgatacagttccccaacttgtgtgatcgagaataccgttaaggatacctgccaattgaatatgccggtacatatcttccgtttgtttccacgcgggctaatcttgaacgtatgactacggaatggaacccagacgaactgttggacggcatcgcccaagacggcaaggcgaggctggtgacaggtgcgcccggagccggtaaaactgagtttgctttgtccgtactcacggcagggcttcgacgttttggcggtgccggggcggtgatggtcgtgcctggtcgtgtcgtcgcggatttgctgggcaatcgagtgattcgtgacatgggctcgtctgtacaggccaggccggtcaccacgttgggggctgtggcttttcgtgtgattgcggcatccagggccgcatctggattgcccttgccaagattgctgaatggtgccgaacaggatgcactgctgcggcaggtgatggccgtgcatatggcgcatgctgccgctggcgacgattgcgcaatctgtgcgttgcttaggaaatactttgcccaagccgattgggccagtctggtgcaggatgctgatggagcagtgcccggaggttcgaccagcgccgatgtcttcgcccgtggaatttcagacgcgttcatcgcccagctgcgcgatatgttggcgcgcttggacgaactgggcgtgaatccttctggggaggccgccttgttggcggacgttgcgcaggatgcgcgtctgctggtgcagtggcgcttggcgtttgccttgcgtagagaatatatcgccgcgcagagtgcggcatctgaggggcaataccgtttggatgcctcatatctgctggtggcgggcgctcgggaaatacatgatgctatggcaagcggccgttcggaggaacaatccgattcgtggttggcatcacgaggattgcctcagctgctggttgtggatgatgcccaagacatcaccctggccggcatgaggttccttgaagagctgaatcacgccggtactgccatagtgctggtgggaaacccggacgaggcggtgcagaccttccgcggttcgtaccccgaatacctgatgaggcaagcggtgacgggaccgatgcaggccgtggagatgacattgcccagcgcggatttcgcaagcggtgagacttatgcttcgctggtcgcctctcgcgtatccctatcgattccttccgaagaggacgagccgttgcctcttgctcgtaggcctggcaagctggtgtccgcgctggataccggtgctgatatcccctcggatgatggcactgtgcagactggattgtatcgttccgcgcgcgaagagcttgacgatgtggtgtggcgcatgaagcgcgcacatctcgatcaccatatccagtggaatgatatggtcgtcatcgctcatgacaatgccactgtgcgtacatacggggagcggctgaggcgcgatggcgtgcctgtccgatactcgtcggttacccgcccgctgaacagtgaatcgttcgtacaggggctgttcgccttgattgagttggcccggttgcgcgctgaaggtgtagcctcctgcaccatgagtctcgccgagaccgcttcctatgttcgtacacgagtgtccacggtgatgaacggaccgttggtgacggctggggccaaacccgggcaagggcggcctgcacggttggcgccaatcgaatccgccatggcggcattggaatccctggcgccgatagcgggggataaggcgtcattgcatgggctgatttcctcgtgggagacgttgcgaaaatcgtccgttgacggtcatgagcgggttgccgtagacgatagcattatcggttttagcgctgatgccgatttggcattcggtgccgatgcgctgtatgtgatgcttgcctttgacgatgcgcaggctcctgccgagaatgtattggacgctatcaccacagtgcttggcgccgacccgcaggctcgcgccttcacgaatctatggacgctggtcggcaagatatctcgagggttgagcaatttgcctccggagcagcgtagcaggccaagttatgcgctcgccgttgcgtggaatgccgcggcaatcgcacctgtatggcagaaattggcattggcgaacacaccagatgggcgtgcggccaatgaccgacttgatgttgctatgaggctgttccaattcgctgaagattccaccgccagtcgggacatcatggggttcatagcgcaggtgcgtgccatgcaggtacaggccgattcgctggctcatattgggccagtggaaaatgcagtgacgttgaccactccggctggtactgcagggcggcattggcagtatgcctggttgccgtctcttcaacaggatgtatggcccaatcttgccggccgcaacaccatgttcggtggtgaggatctggcggaactcgtgttgcgaggcaccttgaacaccgccgatgccgctggccatgatccccaattcattgcggtgctatccagtgagaagaaaagtttcctggtggcgttgaccagagcgtgccgttccgttaccgtcagtgccgtatggaacgacgacctcagcccatcggacttcctgttcggatatatgccggaatactatccgcgggataagcagcgggcacggtttacggacgtgggggagcagaccagcgaatcagggcttgatttatctggattggatggcgacccacgcggattggtgaccgcagcgcgcgtgattgtggcgacttcggaacctgactcgagcgaagctcgtgatgcggctgaaacgctcgcagtgttggctgaaaacggcatagccgccgctaatcctgacaactgggcgttcgcctcggccttatcaagacgagacacatcgtctgccgtatcgcccgcgtctggcagcaagcagacggaagatgatgagcgtacgtcaggcgatgatcacgcacctctcgttacgttatcgccttcggcggtggacggtctctgggcttgcccggtgtgctggctgttggagcaccaatttgcagggcctcaacccggctcggtgaacgcagggttcggcacccttatccacgcggtcgcacagcagggcagcgaagagggactggatcgtctcgactccgatgagtcggcacgcaatgccatggggataagcgatgcgtcatcagtgcagcagcgcatcgaagccgtgaccaagcgcatgattgtcatctatcaggaacagcgcccggatcccgaatcgattgcggatactcgggaacgctacaccgccaagcgcaaagatgactccgccgccgatatcctggccaacatcgccagctattttgtgctcagcggcaccaataccgatgcctatttagacaagaatgtcggcaaattcgagattggcacgttgaccaaggccgattgcgaattgtcgttcgccgcgcgattcgacctgcatgacattgtggctgcttataacgcattgcctggtataaggccagtagaccgcgataccttggccagcatgatgggcttcctagtgggcggatggccgtcaggtatgcgtaacgatctgaccgtgcgcttgtccggtcgcatcgatcgcatggaaacccgtatacttgcggatggcagtgagaacattcgcttgattgactacaaaaccggtgcggcacccaccgtcaagcagatattcaacgacttgcagttggtgtgttatcagctggggctggtctttcccgaagaggggctgcgagggagcgcagcattggctaatgcccctcgtatcgggcagagcgcgctattccatgtggcatacaacgatgcgccggccagaagctatgctccggaaggcgtgttccagccgccgctctttaccaacgggtcgctgaatgccgagccgttcaccgatcgcgcatggtataaggatcccgccaaattcttcgatatgccgataccggattcagctactccgcctgcaggcgtggataccgagacctggaagcagttcgtctcgctgaccggcacccaagcattgtggtcgctgacaatgatcgcccgtgtattctacgcggccgcggccagccggtcgtccgtcatcaatgcccacccgcaggcaacgcatgtggcttattgccgtatgaccggcgtctgcccggcctgtgcaggcaagctcgataccgtgtttgaaacgaggcaggcatgagcgcttttattcccagcgtagaacaggcggccatcatcaacgctcccgctcaggatgacgtactggtggtggccggagccggctctggcaaaacctttacgatgacccagcgcatcatcgcgctcatcaaccgcggtgttgcgccggaacgcatactgggcctcacctttacccgcaaagctgccggagagttgctcgagcgtgtatccgcagcggtatcgcgcgaagattctcctgcagcacagggcgctcagactcctggcgcctcaactcccaacttcgacagggcgttcctgaaaccagccatttttacctatgatgccttcttccaaaccatcgtgcgccaatatggtctgttggttggtttcgatcagaatactcagccactcagcgaggctggagcgctccagctcgccactgaagtcatcgatgagcatatggatcaggctctgagtgaggatttgggcgcattcaccagtcttgccggaagcgtgctggcattatccggtgcaatcggcagtgccatgattggttccggctgcaccggattcgatgaggctgtggaacgcgtgcgtcagtgggactcggctttcgtcgacgcgcttcgcctcgctcttgagaacgaggacattcccgatatcgagccgacaattcccaagatcaagcgactcaaaaaagacagcgacaccgattggcaggcgaagctggacgacagggcgcagcggttgcatgcgcgctgtgcctaccattgtgcacaactgttggaaatcacgcgcaagcgcgaagtgctgctgcaattggtcgaggcctacgcacaagccaaacgccagaagaacatggcggaattctctgatttcaccattgcggcatatcagctcatcgagcgattcccctccatcggagagcgtacgcggtgtcgctacagtcatgtgctgctcgacgaataccaggacacctccaccacgcaggcggcactgcttgccgcattgttccatgtgaataactccgaaaggtgcgcggtcaacgccgtgggcgatccgttccagtccatctatgcttggcgaggagccagcccgggtgcgttccgcatgttccaacgtgactttcatatgccagcggagtccaagccattccctctttcggtcacacgccgtaacagtcgcatcgtgcttgaagcggccaacgatctgacgctgccgttgcgttcgcgccctgcccgtccctccagttcgttgatgcgcgaggtcgacgtatcctcgcttgaccccatgcccgacgcgcctgaaggcacgcttggtgtgctgggattggccactgcggggcaggaaatcgatgccgtagtgcgcttctgcaaggccgccatcgcgcggtatcgcgatgccggggccgcgcaggaggcgccggtcgccgtgctgttccggtccaaatcccatatgcccgagtatcaggaggtattggagaaggccggtctcaccacgtttgtggtcggatattccgctctgctggagcgcccagaaatccgcgatgtgctggcattgctgcacgtcgttgccgaccataccgataccggagcgttgatgcggttgcttgccactccacggttcggtctttcttcggatgacctgaccgcactggcctgcgccgccgaagcgcagaatatggagcaacggttccgggctttggtgcaggccggtgtggctcctgctgatacgccgaggtcgcaatggggtgccgtggttcgcgaacatcgcgatcaggtggccaatgcagtgtttttgccggatctgctgatgcaggataattccagtgtgaggttggatcagctcagtgcttacggtagacatgccgtcgaacaggctgtggaggcactgcgtcaggtgcacgatatggttggccggtcaatcacagatgtgattcgtgcggccatcgaggcgttgaatctcgatatcgataccgtgcttgccggtgctttgcgagacccgcagcatcgtgtcaatccatcgctggcccgcatgcccatggactccattgtggatttggtggacacctatacgcaagagattgctgttgaacagacgcccacattacgtggattcatggcatgggtggatcatcttgccactgtggaagacgaggctgccaaactgcctggctctccggtggatgtggaattgatgaccgtgcaccaatccaagggattggaatgggatgcggttgccgtagtggggcttaatgccggaggatttcccagcaatcagggggatcacctcaaagtcgtgctggatgacaaccatcccggtggcactgaacaaggccaatggacagctcccgaataccacgagagcgcggattcgtggttgaccagccctgtggccgtaccggtgcccgtacgagccgatgccggaatcctgccgcgattccctcatgacgccgatgtgcatggcgatcccattgactcgttgcggaatctcgacgacgtggaactcatcgatgatgaggtgttcggctccatgcgcgaattcggcgatggcgtggaagaggtggatccgcaaagctggtacctgacccagtccgaagaatatggccgcagactgcacgctgacgaacgccgtctggcatacgtggcgcttacccgcgcccgtaacgacgccttgctgacctattgccgctataccggcgaatccagccgcgattgcacgaacgtgccgaaggggtctcgcgccgcaagcccgtccaacttctggcttgaggtgcatgacgcgttgcatggccacgaccatgcaatcgaagctcaggcatacgtggaaggtctgggatccgaagtggcgctggtctcgccccagggtgatcccattgatcctcccgaaggcttcatcgtgggggagaacgccgaacagtactgtgatgctgtggttggcgacgcatggcgtacgccgctggaacagacctccggccggaatgcattgccatggccggcgtcattgggcgaagacaccgcggaacatctgacccgcggtctcgccttggtgcgtaatgccatcaacggaaagcgcaacgcaaaagacgacggccacaacccggccggtccattactgcaacgtgcgcaattgctggtcgatgacgacgatctcatgaccggcacattggagggtgcggcactcgacagggccgtcaaagccaaagcccagcgcattctggctgcgggacgtcagaacgtcaccagcttgcaggcgcgggtgggtggtatgagccaacaggaggagcgctcctactggcgcagcgtgatacggcccatccctcgcgtgtcctcgccggctgccgaagcgggcacacgcttccacgactgggccgagcgtttcatcaatgccggtaagccggatgaggccgcatcgtcggttgattccagcgccgccgaaatcattaccaccggcaatggcgtatcccgcagcgacctattggccgatctgaacgccatcgaccaacaatccgtaccggtctgcgaccggaacctcatgatatggcagcaccgtttggcctcgtcttcatgggcgcaacgcaccccggtatgggctgaacgctcaatcgtggtggatgtgccggaagtcggcatcgtgaacggcaaattggacgcggtgttcctcggcggaatcaatccagccgatacctccaaacggtacaccgtggtcgattggaaaaccggtcatcggcctaccaagccggatgatgtggagcgtaaactcgctcagctcgacatgtatcggttactgctcgccgcggtcgagggcgtggaattggacagtatcgacgccactctctactatgtcagtgagcctgatgaaggcttgcgcgagcttcatgcccgcgcgaaaaccaaacaggaaatccttaccgagttgagctccgggatccccgaacaatctgacaacgactgagtcgcaaggctcatgacctgtactccagctggccggcgtgacgagcgcgtgcccgacagtgtgggtccgcggttgaaacgcaccgcgtgacgttgctcgggcaccgctaccctcggaaggcacgtgtgggcgggcgcacgtgccgaacaacgcaccagtaaggagttgcacgtgtctacggctcgcgctgtatccaagtcgtctgtcactcattcgccgtaccagcggctgttctcgctgcccggaaccaaagcgttctgcatatccggggcggtggcccgtctgccaatctccatgatgagccttggcattgtgctggcactcaatcatttgtacgataactggacgattgccggcaccatgagcgctgcctatgtgctcgccatgagctgtgtcaccccgttctatgcgcgcgctttcgaccgattcggccaggcccgtgtcggccgtcttgcactcgccgtgcaaatcgtcgccatgctggccttcgccttcgcagcgctgatacgagtgccgattccgctgttgttcgtattggccatcatcatgggtctgacccagttctcctttggcgccttggtcagaacccgctggtcatatgcgttgcgcggtgccgaagatggcgagcaactactcaacaccgcttacgccatggaagcggccatcgatgagattgtatttatcctcggcccgatcctggccgcgtggttggccacctcggtgcacccggtttctcagctgtttgtgccaatcatggcttgcggcataggcggcaccgtgttcttctcactgagatccacccaaccgccggtcatcgtggaacaggtcactgtggctgccgccgacaatggccatccaacaccaagcgatgacgccgatcagctgacgctccgccagctcaaacgcagcggagccaagcccaagagtgtgttgctctatgccggtgtgttgcctctgctggccgtgttcatcgtattcaacatgagctttacctcctttgacgtgtcaatcaccgccacgatgaaatccatggggctagagcctttcctcggcctgcagctggccatgttcgcagtcggctcctgcatcggagcactggttttcggctcgcggaagatcaagggttcccattgggcgcatatggtgatgttcctcagcctgttgactgtgggatacgtgttcttccgcctgaccatggacaacctcatcctgttgggcgccatggagattctggccggacttgtggtctcgccaacattcgccaccggcaacctcatcgtcaagggtttggtgccgcccgaatccctgaccgaaggcctgagctgggtgaccaccgcaggcacggtcggtacatcaatcggctcatccgtggctggcattgtgctcgacgcctccagcccgcatgtcggcatgatgctgccgttcctattcacgctggcttcagtaccgctggccttggctggttgggcgctggccaaacggcgtgcgtagatggacgcgggtattggcgcggggccttgctggtgataggctgattgccggttgaatagcagcgttaacaagaagcggggagtacgaatgattaaggtttcggtggtcggtgccaaaggacgtatgggctcgtatgtggtcgaagcagtgaacaacgccgcggacacacagctggcgcttgctttggacgccggtgacgacctgacccgaatcgcccccgacaacactgatgtcgtggtcgagttcacggtaccgtccgtcagcctgaacaacgtacttaccctgattggccaaggcgtggatgtggtggtcggcaccactggctggactgatgagaaactcgcccaggtcaaggaagccatcgcgggcgggcccaagcccgaaacccagaaggtgttcatcgcccccaacttcgcgatttccgctgtgctggccgactactttgccaccaaggccgccagatacttcgagtccgcggaagtcatcgaactgcaccatcccaccaaggtagacgccccctctggcaccgccatccacactgcccatggcatctccgaagcgcgcaaggccgccggtatggctcccgtgccggatgccaccgaaaccgacggcggctcacgcggtcaggtggtcgacggcattcacgtgcatgccgtgcgcctgcgcggcctcaacgcccatgaggaagtgttgttcggcaacgccggcgagcaactcaccattcgtgccgatagcttcgaccgcaccagcttcatgccgggcgtgctgcttgccgttcgcaagctcgccactgacgcccctgctggcctgactatcggcctcgatcacttccttgatctgtaagccggcggtagtcgccagtcaagacgtgacgaacgattgactggcaactgctggccataatggtacgtaacataagagtccacattgggaagtacggtgaacactatgagtgagcatgacatgcatcttcttgacccagcgccttttggccgcattttgccggctatggtaacccctatgaaatccgacggcagtgtcgatttcgatgctgcgcagaagctcgccaagcagctcgtcgccgatggtgcggatggtctggtggtcaatggcaccactggtgaatcgccggtcacccacatggacgagaaggttaatctggtcaaggcggtcaaggaagtcgttgacgttccggtgatttccggtgctggatccaatgacacggctcataccgtgcgtatggtcgagcagactcaggaagcgggcgccgatgcggtgctcgtcgtcatgccctattattcccgcccctcgcaggacggtatcgtcggccattacaaggccgtcgacgaatccgccgaaaagccgattatcgtctatgacgttcccggccgtaccggcttgaaggtcaaggtcaacacttacgaccgtttggccgacctcgaacacgtcaaggctgtcaaggacgccaccggcgatcttgcagccgcagtggagaagcagcagcgcaccggcctcgcctggtattccggcgatgacggcttgttcctgccgttcctttccattggcgccgtcggcatcatttcggtgattgcccatgtcgcctccaaccccatgcagcagcttgtccaggcatttgatcgaggcgacatcaccaccgcccgccgtcttgccaatcagcttgccccgcttgtccacgcgctcaatggcgacggctatcaggccgtcatggccaaggccgcgctgaaggtcagaggagttattccctccaccaccatgcgcctgccgaatatcggccccgatgccgctcagctcgacaaggctgaagagggcatgcgcgccgccggactgctctaagcccctgcatacgggttgccatcccgccgcttccgcatgacagagcggaagcaacactcaagaaaacaattaagaagttatggcaacagaacagaagaaaacaaagacagccaaaagctccaactctcgtcgtcgcggttccgcccgcaacagcaaggccaacggttccaacagccgcacgccgtctcgtaagatcaacgccacccagcaggccaccgctccccagcaggatgccgtgctgatcgccccgccgaagtaccgcaagggctccatgcgcatcacgccgctcggcggcttgggcgaaatcggccgcaacatgaacgtgatcgaatacaacggtcacctgctgcttatcgactgcggcgtgctcttccctgaagaggagcagccgggtgtcgatctcatcctgcctgatttcagctacatcaagaaccgtctcgacaaggttgacgccctggtgctcacccacggccatgaagaccacatcggtggcgtgccttacctgctgaagctgcgcccggatattccactgattggttccaaactgactcttgcctttgtggacgccaagtgcaaggaacaccgccagaaccccaccaaggtggaggtctccggccgcgacaagctcaaggtgggtccgttcgacctcgaattcgtcaacgtcacccactccatcccggatgccctggccgtttacgtcaagaccccagccggctccctgattgacacgggcgacatcaagctcgaccagctgccgctcgatcaccgcatcaccgatctcgtggagttcggcaagatcggcgaaaagggtgtggatcttttgatgatggattccaccaacgccgaggttcctggcttcgtcaagccggagacctccattggtccggctcttgaccaggcatttgcgcaggctacccgcaagatcatcgtcgccagcttctcctcccatgtgcaccgcgtgcagcaggtggtggatgccgcccacaagtacggccgcaaggtcgtgtttgtcggccgttcgatggtgcgcaacatgtccatcgctgccgatcttggatatctgcacattcctgaaggcaccgttgtggacctcaagaaggccaacgacattcaggacgacaagctcgtctacatgtgcaccggctcccaaggtgagccgatggccgcccttggccgtatcgccgacggcaaccaccgtgacatccatatcaatgagttcgacacggtgattctcgccagctccttgattccgggtaacgagcacggcgtctacaaggtcatcaacaagctggtgcagctcggcgccaaggtcgtcaaccgcgacaatgccgccgtgcacgtgtccggtcactgcaatgagggcgagctgctgtacatgtacaacatcgtcaagcccaagtgcgccatgcctatccacggtgaaaaccgccatctggtggccaacggactgattgccgtcaagaccggtgtcgacccgcagaacgtggtgctggccgaggacggcgacgtggtcgacctgtatcacggcaaggccgcagtcgtcggctccgtgccgtgcggctacgtgtacgtcgatggcgattcggttggcgagctgaccgatgacgaactcgagaagcgccgcatccttggtactgaaggcttcgtctccgcgttcgtggtggtcgataccgataaccacgaggtcgttaccggcccgaagatctacctgaatgccgtggcagaggacgaaagcgagttcgacaaggtgcgtcaccagattgccgaacagctgaacgacgcgatgatgcagggcactcgcgacacctacaagctgcagcagattatgcgtcgtacactcggcggatgggttgcccgtcagcttcaccgtaagccgatgatcgtgcctgtcgtggccgacatcgctcaagacgtcgaaatcgtagacaacaactgatcaggattatccagggacgaccgtaaggagtaattgaagtcatgcccggttccaatctcactcgtgtcgaggccgaagcacgcaaggccatcgttgaggcaccgattcactatcatgtcgaccttgacctgacggttggcccgaagaacttcggttccaaggcgctgatctgcttcaatgcgaagcctggttcatcgacattccttgacctgattgccgatgaggtcaccgccatcgagctcaatggcaagtctctggacccggctacggcgttccaggacaaccgcattgagcttacggatctgaaggaaaagaacgaggtcaccgtcgaggcgctgtgccgctactccaacaccggcgaaggcctgcaccgttcggtcgacccgtccgatggcaacatctacctgtactcccagttcgaggtgccggatgcccgccgcgtctacgccgtgttcgaccaacctgacctgaaggccaccttcgatttcaaggtgctcgctcccgccagctggatcgtcacctccaacatgccggtcgccaccatcgaggacgatccgcgcgaaaccctggatggcacacttggcgataagccgaacgaaagcacccgcctctgggacttccagccgaccccggtgatgagctcctacctgaccgccatctgcgccggcccgtacgccgaatggcacaccgaataccttaacgaggatggccgtaccgtgccgatggcccagtactgccgccagtccctggccgaggccttctccaaggacgtcgattatctgttcgacatcaccaagaagggcttcgcgttctacgccaagacctggggcgtgccttatccgtacgccaagttcgaccagatctacgtgcctgaatacaacgcgggcgccatggagaacatcggcatggtcaccatccgcgactcctacgtgttcgagtccaaggtgaccgatgcgctggccgagcgccgcgtggtcaccgtgctgcacgagctggctcacatgtggtttggcgactacgtgaccatgaagtggtggaacgacctgtggctcaacgagtccttcgcggagttcacctccacgctggccaccgccgaggccaccgaatggcacgatgcctgggccaccttctgctccggcgagaagagctgggcgctgcgtcaggatcagctgcccaccacgcacccgatcgtcgccccgatcaacgacctcaacgacacctacgtcaacttcgacggcatcacctatgccaagggcgcgtccgtcttgaaacagctggtgttctacgtgggccgtgagcgcttcttcgaaggcatccacaactatctcatccgccatgcctattccaacgccacgctggccgacctgctgggcgagctggagaagacctccggccgtgacctgaaggcctggagcgccaagtggctcgaggaatccggcatcaacacgatcgccgccgatattaagacgaacgccaacggcaccatcgccgagctcaagctcacccagagcgccccggccgagcacccggtgctgcgcccgcatcgtctggccatcggtttctacaacgaagatgccgagaccggcaagatcgtgcgcactgaacagttcgagctcgatgtggacggcgagaccaccatcgtcgaagccgcggccggcaagcagcgcccggccttcgtgctgattaacgacgatgacctgacctacaccaagattcgcttcgatgccgagtctcaggccttcgccgaagccaacctgcagcgtttcgacgatgctctggcccgcgccgtgacctggctcgccttctgggatatgacccgtgacggcgaattcccggccgaacgcttcgtggacatgaccctgcgtctgctggccacggaaaccgaatccaccaccttccgctatgcactggcctgcatgagcaccaccgcccaccactatgtggcccccgcacgtcgcgaggaggtgctgcgccacgtggccgccgagctgtggacgctggccaacgccgccgaagccggttcggacacccagttccagcttgccaccgcgtacctgggctatggcgaagagggtgacgcggcattcgccgccaatgcgcgtggtctgctggacggtaccgtgacgctggacggtctggacatcgacaacaacttcacatggaccatcgtccagtcgctcacctccgtcaacgagatgaccaacgaggacgtggacgcgcagcttgccaagaaggacaccactgaaaaccgtgagttcgcttacggcgctcgcgcttcgatggccacggttgaggccaaggaatgggcttgggatcaggcgctgcacaacgacgaactgaccaactcccagcttgaggccgtggcccgtggcttctccgccactccgcgagccgatctggtcgagccgtttgccgccaagtatttcgagaccgttgactgggtctgggccaacaagacctatcacatggccgaggcgttgctcaacggcctgtatccgggctacgccgatcccgccacgctgaccaagcttggtgacgcctggcttgaggaacacattgccgccgacaacgccctgaagcgtctgatcgtcgaaaacgtggcctcctcccaccgcaccctcaaggtccgcgaatacaacgaggccctctgatttctggctcccctctctgaggggagccccttccgcgaggaacctcgtccacattccaacataaaacccgcaaccaatccccaacagcgtattctcactcaaggccggcaatgtaccggtcgacgagcggaaggatacggggaatgattgcgggttttgttgcgctgagggccgttcagtggggtgtttcctcggtttggtcgaggttttgcttcgctggtgactgctcagtggggtacatcctcaatcggctcgatgttttgcttcgctgaggggctgtgagcggggtgaattttcgactggttcgtggttttgcttcgctgagggttgttcagtggggtgtttcctcggttgatccgatgatttgcttcgctgatggacccccggcgcagattccgtggcggtttttcgttgggttggtgtttggggtggagcgtagcgactacgatggtgcgggtaacgcgatacaaggagtggaacttcattatgccgaacatgtttggaaccgatggcgtacgaggactggccaatagggatttgaccgcacgactggcgctggatctgggcgacgccgccgtgcgtgtgctcggtgacgccggtacgcaggacgaccagcccgagggccgccgccgtgcgctggtgggccgtgatacccgagtttccggagatttcctcgcttctgcgctgtccgcaggcatgtctgccggcggcttcgacgtgatcgatgccggcatcatccccactcctggcgtggcctacctgactagcgtgctcaacgtcgaaatgggtgccgtgatttccgcctcccacaacccgatgcccgacaacggcatcaagttcttcgcacgtggcggtttcaagctgcccgaccagaaggaagacgacatcgaggccgtgctcggccaggactgggaccgcccgaccggtgccggcgtgggccgcgtgagccacgaccagaccaccgccaccaacctgtacatcgaccatctggtttccaccatcgcgccgctgaacgatgaccagacccagcccaagccgctgaagggtctgaagatcgtggccgactgcgccaacggcgccacttccgtggtggcccccgaagcgctgcgtcgcgccggtgcggacgtcatcgtgatcaacgcctcgccggacggctacaacatcaacaagaacgccggctccacccaccccgagcagctgcaggctatggtcaaagccaccgatgctgtgatgggcgtagctttcgacggtgacgccgatcgctgcctggcagtggacgaagacggcaacatggtcaacggcgatcagatcatgggtatcctcgcccgcgccaagaagcgtgaaggcaagctcaaccacgacaccctcgtggtcaccgtgatgagcaacctcggtctgaagctcgccctgaaagacatgggcatcaagaccgtggaaaccggcgtgggtgatcgctacgtgctggaagaaatgctcaagggcgattactccctcggcggcgaacagtccggccatgtgatcaaccgtgagttcgccaccaccggcgacggcacccttactgccctgaccctgtgcaatgaggtcgtcaagtccggcaagagcctcaaggaacttgccgcagacttcccgcaactgccgcagaccctcatcaatgtgccgaacgtcgacaagaaggccgccgccaccaataagcgcatccaggaagccgtggcccacgaggaacagctgctgggcgactccggccgcgtgctgctgcgtccctccggcaccgagccgctcgtgcgcgtgatggccgaggccgccacccaggcctacgccgacgaagtctgcacccgcctcgccaagatcgtggccgaagaactggcgctataacacaccacggctttgctcccgctggcgggagctgtcagccgcaggctgactgaggatggttgatgaggctgaaccgcatggaaccaccctcagtctcattccattcgacagctcccgccagcgggagcagcaaaggaaaacacatgtttgggaaaaacgccaaagtagacttggaacttaaccgcgatattgaacgtctgattaaatccggcggcaaagaacagattctgcccatcgtgcaggctggtgaaccagtgctgcgccagcagaccgtggcctacaatggccaactttccaagcgcacgcttgccaaactcatcgacaccatgcacagcaccatgctcgaagcgcctggagtgggcttggccgccacgcagatcgggctcggattggcgcttgccgtagtcgaggaccatgtgcgtgacgatgaggacgatccgcgtgaaatcgccgagttccctttccatgtgatcatcaaccccaagtacacgccggtgggggagaagaccaccagcttcttcgagggatgcctgagctttgatggctatcaggccgtgcgtaagcgctggcttgacatcaccgctgaatgggacgatgaagacggcaaacatcacagcgaacagctgcacggttggcccgcgcgcatcttccagcacgagaccgatcacctgagcggcgaactatacatcgacaaggccgaaatccgttcgctgaccaccagcgaaaatctcgaagacctctggtgcgacgatccggtacccacagaggccgccgaagaacttggttttgcattatgaccgattccgcctggcttgagaccgccaaagatgacatcgctcagtgggcgatagtcatgaccaaggacgcggatgataatcccattgattggcggtgggtacgttcgcttgacctgtttgacggacttggccacgcggccggtgacaatccgacccctcaagccatccatgatgcactcaaagccgattacgccgtgcgcgatcgcttggagccgatcatcgcgcaatgcagcaccgcattcatgactgactttgatcgaatcatcgcatcctaccgtctgccacgcgcactggcttatgtcaatcggcgattgaacgacaccatcaacaccttgcttgatgcgggggagcgccggcacctgtggaaggtaagtcgtgaacggcaggggagaggcatggcagcggtgctcaagccgtattccagcgccacagcagatcccaatcaaggcacacttgatgccgaggctgaaggtgtggatggttttgccggcactgtggatatcgccctcgacgatattcaagaccgctccgcggcgattcttaacgccagagctgaacggcgcaaggccaagcgtgagcaaagccacgcgggtagggtggatatggctcgtgccaacctctccggtgcaacggcaccgggtgggagcgtcaccttgtttagcaatgactcgtcaagttctggtgccgccgcgcataagcccaaatcggattggcgtgatgcctacctgccgggacgtgacgtggacatggtgatgggcatcgacatcgaaaccactggcaccgatccggctcgcgactacatcatcgatgtcggctttgaatttatgaacatggtcagtccgcgtccgaccgatgtgccgaacagttatgcgtatgagcagggctactacgatgccggtgacgcctatggccagtctcgccttgacttcggtgttcccccggccaatgcggctctcggcaacgaactcattcgcaaactcacaggtatcgatgtgcgagaccgcagcagcaaggccggtcatcggcttttcgatgaatggccggaagcccagaccggtctgctcgcgcgcctgacccagcagccatatgtggcgcacaatgccacctttgaacacagctggttcatgctaaatgtcgccggatacgccgaagcctatcgcgccggtcgcatcaccatcatcgacaccctgcccatgagcaggcaatgggatcctggctcggtgcccaacgatgaacacccctatggtgataacacgcttgatgcttatgccaagcgtcagggagcgcttgattcagcccataacgaacggcatcttggactggaagacacgcatatcatgctggtggccatgaaacaccacctcgcaaccctcaaggcgcaggggcagggcccgtggggtccgggcggcagaagcggcgtgggcggcaaatcatgcggtcgtaagtggtgagtacactactgacctcgtgagtgaatatcaggacagccgacaacagcgcgaaaaccgccgccgcaccattgtgcgcgtggtgtgcatcgtcgtggctgttgccatgcttggctccctgattgtccctgctatctatgcaggtctttgacgttgccttcgtgcatttgcgcccgcggttgagcgcgtctgatgcagaaggagtgacgagaaaagtctgctgatcggctgcagaaacactcttacgacatcacaacatcgcggtgccagaaccattacggaatgtgcgaaggctgtcaacgaggacgcgacatccaagaaaactcgaagtatcaacagttaaggtaagacacgatggcagaatttgactttacccaggcgattggcgaagctcgcgccaagtacgattccatcgccaaggcgttggatgtggaccgtctcaaggcggatatcaaggatcttgagtcgcaggcggcggctccgggattgtgggacaaccctgacaacgcacagaaaatcaccagcaagctctccgcagcggaatcgcagctcaagcgtctgacttctgcatcccagcgcatcgacgatgtggagacgctcgtcgagctcggccaggaggaacaggatcaggaatccttggacgaggcgcagaacgagatcggcgagattcagaaggatctcgaccaaatggagatacagaccctgcttgacggcgaatacgacgaacgttccgccgtggtgaccatccgctccggcgcgggtggcgtggatgccgccgacttcgcgcagatgctgctgcgcatgtacctgcgctactgcgagcgcaacggcttcaaggccaaggtcatggacacctcctacgccgaagaggccggcatcaagtccgccacgttccaggtggacgccccttatgcatatggccgactgtctgtggaaggcggcactcaccgtctggtgcgtatctccccgttcgacaatcagggccgccgccagaccagcttcgccgctgtggaagtggtgcctctggttgaggccaccgatcacgttgacattccggacacggatatccgtgtggacacctactgctcctccggccccggcggccagggtgtgaacaccacgtactccgccgtgcgcatcacccacttgcccaccggcatcgtggtcaccatgcaggacgagcgctcgcagattcagaaccgcgcctccgccatggccgtgctccagtcccgattgctggtgctgcgacacgaggaagaggccaagaagaagaaggagctcgccggagacatcaaggccagctggggcgatcagatgcgttcctacgtgctgcatccctaccagatggtcaaggatctgcgtaccggttacgagaccagccagacccaggccgtgttcgatggtgacatcaacaacttcatcgaagccggcatccgctggcgtcatgaacagcgtcgtgctgccgagaacgaggagtaatcatggctttgattgcattggacgatgtgtccaagatttaccccaagggtactcggcccgcgcttgatggcatcaacctcagcatagagcgtggcgacttcgtgttcctggtgggcgcatccggatccggtaaaaccacgctgctgagcctgctgttgcgcgaggaggaggccaccagcggtgagattcgtgtggccggcaacgacttgcgccgtatcgccaaccgtcaggtgccgcattaccgccgtacgctgggcttcgtgttccaggactacaagctgctcaacaacaaaaccgtgtgggagaacgtggcgttcgcgctcgaggtgatcggtacccgccgttccaccattaagtctttggtgcccaaggtgctggacaccgtgggtcttaccggcaaagagaagaactatccgcatgagctgtccggtggcgagcagcagcgcgtggccatcgcccgtgcgtatgtgaaccacccgcagatcctgttggccgacgagcccaccggcaaccttgatccgaccacatcgctgggcattatggaggtgttggacgctatcaaccgtaccggcaccaccgtcgtgatggccacacataacgaagagatcgtcaactcgatgcgcaagcgcgttgtcgaactgcacgatggcaagatcgtgcgtgatgaggcccacggttcctacgattccgccctgtacttccccgatgccgaggccgaagctaaattcggcagggccaaccacatccccgatgcccagaccaacgccatcgccgcgccggaggagggcgagccgtccgaaggcatcgcacgtctggccaattccgtgcattccgggcgaaccggccgctacggtgagacttttgcgccgttggaagacacgttgacatggggcaagggcctgactttggacgagcaggctgcatccctcgaagccacccaggctttcgattcgttgcatcccgaggaaagtgtcagcagtacgacagtcgaggtttccgaaacgctcgctgtgccggagacgcccgctgccggtgagatacctgagcggcagtccgtcggtgacggcgaagggacgaaccaggtcgagccctcgtcagtgcaagcagacgaggtgcctatgccgccggctccgccagccccacctgcgccgccgagcgccgaatcccagagtgcaaccagcgaaggcaaggaggagtagcccatgcgtatgcgattcatcctgtctgaaacaggaaccaatctgaggcgtaacctgtccatgctgctctcgctcatgctggtcacgttcatctcattcctgttcatcggcgcttccgtgcttactcaggcccagatcaccaaggccaagggcgattggtatgacaaggtcgaagtcgtggtttggctgtgcccggatggtacgagccagtccgccaactgcgcgtccggtaagtcgccgtctgcggccgaaatcacggcactgcagaagaccatccgcgacgagctcaacgatgtggtgtccaacatcaactatgtgagcaagcaggacttctacaacaacaccttcaccaagcagtacccgaatggcgaattccaaggtcgtacgctgactgccgacgacatgcaggattccctgtggctgaagctcaaggaccccaccaagtatcaggtggtcgccgaagtgctctccagtaaggagggcgtggaagacgtcaccgatcagcggcagatcttcgatcccgtattcgccattctgaatcgcgccactgcggtcacggccgttctggcaggcgtaatggtgttggtggccatcctgctgactggtactacgattcgcatgtccgcagcatccagacgcactgaaaccgaaatcatgcggtacgtgggtgcctcgaactggacgattcgtctgcccttcatcttggaaggcgccatcgcttccggtatcggttcgatactctcctgcgtgatgttgtcggtaatcgtgcatgtgttcatcaccgggtggttggctcaatcggtgacttggattccgtacgtgaatcagatgaccgtgctgctgatttccccgttcctggtcgtgggggcggtgctgctttcggtgattgcctccaccatttctctgcgacggtaccttcgcgcgtaagacgtatcatactcactgcgggtggcgttcccagattcgcatgttatggtgtggtctattgcgacggaaaggatttatatgactaaggcgaaaacgatgaggccagtgttggctgcatgcgcggccagcgccatatgcgtggccgggctgctggccagccctgttcagccggcgcaggcaaacacctattcgaatttggtcaatgcgcagagccagcatgccgcatccgtgcagcgtgaagcccagctcaagcagcagctagccggtgcgagcaccgaactggccgacaagatcatggaattggatgatctgaccaacaacaagatcgtcgccgcgcaggataaagtcactcaggccaatgccgacgccgccacggctcaggaagaagccgatgccgctgcctcaagactggaagccgcgcagaaggacaaggaagatctcgaggcgcagatcgagaaaaccggtaaggactacgacgacgcccatgccgctgtggcccaattggcccgtgaagagcagcatggttccgatgcctcggagattatgagcgtggtcactggtgcctcgagtaccaaggacttcgtcaactcgatgcagtcgcgtgacgcactgtctcgtaacgaggctaatgctgcctcctcggcggccaccgagcttaatacctcgatgaaccgcagcgagcgtctggacgcgatcgagaagcagatcgccacactgaagacccaggccgacaacaaggccgccgcggctcagagcgccgcggaaaccgcgcaaaatgagcgtggtgctctggaacagttgcgccaggagggcgaagccaggcgcaatgaactgaccggcatggtgtccagcctgaagtcccagtcggcgaagcaggccgcgcagaccgtgctgatcgcttctcaggtggactcctacaaccagcagtacatcaaggaacaggcaaccgccaacggccaggtcagcagcggccagcagagcactggtggttcggccgcacctgctccttccgcaccagctccgtccgctccctccggtggcagcacgtctgccggcggaagcacggggcagggcacctcgaatggtgatgtcggcaaccggtatgtggccggccaatgcacgtggtatgcgtacaaccggcgtaaggcaatgggcatcggcacgccatcgttcctgcacaatggcggccagtggtacatttacgctccccaatacggtttgcgggtggatcacagcccgcaggttggcgcggctctctccttcccgccgggtgtggctggcgctgatggctactacggtcacgtggccgtggtggaagccgtgtacggcaactcgattctgatttccgaaatgaacgtcaagggcgagttcatcgtcagccagcgcgttctgtacaatcccggtcagtactggtacgttcactgatccggctgtaccgaattacgttatgcaaggccccgtttggggccttgttcgtatgtgcagacggttcatgatattctcatatgttgcgttgcacccacgaaaggagggaacccatgcccaaggaggccggcgaaaagctgatcgtgcagaacaagaaggcccggcacgactacgccatcgaagacaagtatgaggccggattggcgttgaccggcactgaggtcaagtcattgcgcgaaggccgcgcgtctctggccgaggcgttcgtttccatcgatcgccgtggagagatgtggcttgagggggcgaatatccccgaatacctgaacggcacatggaacaatcatgcgcccaagcgcaagcgtaagctgttgctgcatcgcgtgcagatcacgaagctcgctcgcggcatcgaggccaagggatacacgattgtgccgttgagcctgtatttcaaggacggtcgcgtcaaagcggaaatcgcccttgcccgaggcaagagggaattcgacaagcgtcaggctctacgtgaggagcaggacaagcgcgaggccctgcgcgccatgcgctatgccaacatgcgtcactgatttgtccacgttgcggactttttcgtccatgattaacgctttggtagcatgacgttcctaatctctggagccatctgggaaacatacccgcccagctgactatccggagagaggaaatccaatgtctctaagcaagggaatacaatccgctgcggccgcagctctgagtgtcgccatgctgatcgccgtggctgcctgcggcacgagcgatagcgcggacactgcatccagagctgctgattccaaagattcatccagcacgtccagcacgcaaggcttcgacaccagcggcatcaagaaagacgatgagatcgccgcgctgctgcccgattccgtggccggcgacggcacgctgaccgtcggcaccgatacttcctatgccccggccgagttcctggccgaggacggcaggaccccggtcggctttgatgtcgacctgtccaaggcgctggccgcagtgttcggactgaaggaaaacaccgtctcctccacgttcgattcgattatcccgtccgtcggctccaagtacgacatcggtatctcctccttcaccgtgaccaaggagcgcatggaggccgtggacttcgtgacctacttcaaggccggttccacgtttgtggtgcagaagggcaacccgaagaagatcgatacctccaacctgtgcggcgtgaaggtggctgtgcagaccggtaccacccaggaagaggaagtcaacaaggataacgagcagtgcaaggcggacggtaaggatgccatcgacatccagtcctccaagctgcagaccgatgtgaccaccgccgtggcttccggtaaggctgatatcttctacgccgatacgccggttgccggctacgccatcaagcagaccggtgatacgctcgaggccctcggcgaggatgttggcgtgacccctgaggccgtggccgtcaagaagggcgattccaagaccgccgaagccgtgcagaaggccatccagaagctgatggatgatggcacgtataagaagatcctcgacacgtggggcgtctcttccggtgccgtcgacaaggccgagatcaatccgtccgtcgaatagtttcggttactatgaagactcccgttgctctgcggcgggagtctatttgtatatgtatgcactgtggtgtataaatatgcttaaccgttgatcgttgccgcataagcggcgtaagagagaagaagaaacgattatgcagtccaccaaactgaagtccatgatggccatggcgctgagctcggccatgctgttcgccaccgccgcttgcggcacctccgacaaggccgatgccggtacggactccgccaagggttccgatgccgccaccatcaccagctacgatgtcagctccgtgaagaaggacgacgccatcgccgccctgctgcccgaatccgtgaccaaggacggcaggctcaccatcggcaccaatccttcctacgccccggccgaattcctcgacgctgacggcaagacccagatcggctatgacatggacctcgcccgtgcgctgggcaacatcttcggtttggacaccgaaatcgtctcctccaacttcgacaccatcatcccggccatcggcaccaagtatgacctcggcatcgccgcgttcaccatcaccaaggaacgtatgcagtccgtggacttcgtctcctacttcaccgccggcatgggctacgcggtggccaaaggcaaccccaagaacgtgaacccggatgacctgtgcggcctgaacgtcgccgtcgagaccggcaccgtcgaggaggacgccatcaacgagaccgccaagcagtgcaaggcggacggcaagaaggacatcaccatccagtcctccaagcagcagaccgacgccaccaccgccgtggtgaccggcaaggccgacgtgttcttcgccgattccccggtggtcggctacgccatcgcccagaccgagggccagctggaacagcttggcaaggacttcgactccgtgccgaacgccatcgccatcaagaagggcgattcccagaccaccgatgccgtgcagaaggccatgcagaagctcatggacgacggcacctacggcaagattctccagcactggggtgtggaatccggcgctctggacaaggccgagatcaacccgtccgtcgactgagcgtacacagcggtcaatcagcatcaagcaatccagatggggcgtactgtatgtaacgcaggcgccccatctgtgcgctaaggttcaacgctagttgcaactatcgcagcccaggctgcccaaagacacccaaggaaccaaactatggcgaagaaagaagtcgacggcgaaggattgaacatccccaaccgcatcaaggcgctgccggtcaagcgtcccggcccgattgtggccgccgtgattgtggtgctgctcgccgcgatgcttattcagggcatgatcaccaatccgcgattggattggcccacggtctggaagtacctattcaacgagaacgtacttgaaggcatccagtacacgctcaccctgaccgtgatttccatggtcgtggccatcatcctgtcggtgattctcgccattatgcgcaagtccatcaatccggtgctgcgcggtgtcagctggttcttcatctggttcttccgcggtacgcctgtgtacacgcagctcatcttctggggtctgttcgccgtgctgattccaaaaatcagccttggcattccctttacctcagtggaattctggagcatcgactccaacgtggtggtcactgcattcaatgcggcgtggattggcttggccctgaacgaggccgcctacctgtccgaaatcgtgcgcgccggtcttgaagccgtggatcccggccagactgaggccgccaaggcgctgggcatgaaccgcacgcttatcatgcgtcgtatcgtgctgccgcaggccatgcgcatcatcatcccgcccaccggcaacgagaccatcggcatgctgaagaccacctcgctggtcaccgccgtgccgttcaccctcgaactgcagtttgccaccaacgccatcgccaaccgtatctacaagccgattccactgctgatcgtggcctgcttctggtatctgctgattacctccatccttatggtgtgccagtcccgcctcgaagcgcacttcggcaagggcttcgatgcccgaccggtgggcaccaagggcaagcaggcgccattgccgggtaagaccgacggtgagccgaaggatgacgtggacaagctcaaccagaccacatttgtcggattgaatgcataaggcgggagtgcgattatgactacgaatgacatcaccagtgttgtcccagccgtgcacaaggcggctgacggttccgtgattcccgctgtcaaggcggtgcaggtgcacaaggccttcggcccactgcatgtgctcaagggtatcgatttgaccgttatgcctggtaccgtgacggtgattctgggaccctctggttccggcaagtccacattcctacgcctgatcaaccagctggagactttgaccggcggttcgatcgaggtggacggcgaactcatcggatacaagcatgtgaccaagaacggtcaggatgtgctgcagactctggatgacaaggagatcgctgcgcagcgttcccgcttgggcatggtgttccagcgcttcaacctgttcccgcacatgaccgccctcgaaaacgtgatggaagctccggtgcatgtgcagcacaagtccaagagtgaagcacgcgcactggccgaagccgagttgcagcgcgtcggtctgggcgatcgtatggattactacccgtcacagctttccggtggccagcagcagcgtgtggccatcgcccgtgctctggccatgaagccggaaatcatgctgttcgacgagccgacttccgcccttgaccccgagctggtgggcgaagtgctcaatgtgatgctttccttggccaaggagggtatgacgatggtgtgcgtgacgcacgagatcggctttgcacgtgaggtcgccgatcagattgtgtttatggatggtggtgtggtcgtggagaaaggcggccccgaaatcatcgacaatccgaccgaaccgaggttcaaagacttcctgcagcacgtgctgtagtccgcactctggctcccctctgaagaggggaaccgttttttgcgcccccgccagcgggggcacggctagggccccgcatgttccaatcctgcaaaggcggcgggttggattcgcttcaggcaatgtttgtccgctaggctggtgagccatgtgtggaatcgttggatatgcgggaaatgtggaaacggcgtgcggcaagcccttggaggtctgtctgcaaggcttggaacgtctggaataccgaggatatgattcagccggcgtggcgctgaccgcacctggcatggataaagtgaccgtgcgcaagaaggccggtcgtctgaagaatctggtcgaagacatcgaacgtaagccaatgccgctggccaccgtgggtatcggccatacgcgttgggccaccaacggcgagccgagcgatgtgaacgcacatccgcataccagtatggacggcaaagtcgccatcattcacaacggcatcatcgagaacgcctcccagctgcgccttgatctgcaggccgagggctaccgattcgcctccgccacggataccgaagtggccgccaagctgctgggcaaaatcgtggacaagatcattgcggaagagggcaagccgaacctgttcaaggcagtgcgccgcatggcccgcatgttggaaggcgcattcaccattctggccaccgactgccgtcagccggatatcgtggtcggcgcccgtcatgattctccgctggttgtgggccttggcgatggcgagaacttcctcggctccgatgtggccgcattcgtggcatataccaagcgcgccatggaagtcgatcaggatcaggccgtgtgcgtatccgccgataaggtcattgttaccgacttcgacggcaatgtgattgagaatccgaagacctacaccgtggactgggacgcctcggccgccgaaaagggtggctgggattcctttatggacaaggaaatccacgaggatccggccgccgtgcagcgcacgctgctgggccgtttcgacccaaacggcgacatcaccctcgatgaggtgcgcatcgaccagcatgactttaaggccattgacaagattatcgtcgtggcctgcggcaccgccagctatgccggtcaggtggccaagtacgccatcgaacactgggtgcgcattcccgtggaaatcgaactcgcgcacgaattccgctaccgtgacccgattctgaccccgcgtacgctcgtggtggccatctctcagtccggtgaaaccatggatacgctgatggccctacgccacgcgcgcgaacaaggctccaaagtgctggccatctgcaacacgcagggtgcttccattcctcgcgaatccgacgccgtgctctacacgcacgccggcccggaagtcgccgttgcctccaccaaggccttcgtggcgcagatcaccgccgcctatttgctgggcctgtatctggcgcaggtcaagggttcgatgttccgcgacgagattcatcaggtgcttgactccctgaaggacatgccgcgcaagatccagtgggtgctcgacacgcagcccaaaaccatccaggccgccgccgagcgcatggtgaatgccaactccttcctgttccttggccgccatgtgggatacccggtggcgctggaaggtgcgctgaagctcaaggagatcgcctacacctttaccgagggctttgcggccggcgaattgaagcatggcccgattgcactggtggacgagggtgagcccgtggtgttcatcgtgccgccggagcgtggccgcaatgtgctgcacgccaaggtgatttccggcatcgaggaggtcaaggctcgtggcgcgtacatcattgccgtggccgagcagggcgacccggatgtggaacggtatgctgatgtggtgttctggcgcccggcctgcccgacgctgatgagcccgctggtggatgtggtgccgctgcagctgttcgccatggatatggccaagctcaagggctatgacgtggataagccccgcaacctcgccaagtccgtcaccgttgagtaagccacaccgatacgttattgacgagcctcatattccgtttgagatggacgtgctgtatgaggacgagcggatcattgtggtggataagccgcattttctggctaccatgccgcgcggcatgtggtatcgcgaaaccgcgctgatccgattgcgcgagcgtctgggggagccggatatcacaccggcccaccgtttggatcgcatgactgcgggcgtactggtctttgtgcgtgatccggcttgccgtggagcgtatcagatgctgttccagaacaagcaagccaccaagatctatgaatgtctggcattgtgcgcgccgattcgtcgaccacgatttggcacgattacacaggctgagccgccgcgtccgtttccgttgctgcgccgctcgcacatcaccaaggaacgtggcacgttggccgccttcgaggagccgggcgcagtcaatgctgaaaccctgatcgagcgcggcgaactcatacttccttccgctggcgggaggtggcgcgaagcgccggagggtggtccctgtctggagaatcccctcatctgccgctacacgcttcatccgcgcaccggcaaaacccatcaactgcgcgtccacatgaactcactgggcctacccatcgtgggtgacgatttctacccgcgcatccagacgcgcctttacgacgatttcagccaaccattgcaattggtcgcacgtgtgctgcgcttcaccgacccaataacagggaagcgacaagaattcgtttcccgtataccattaatcagctaatgtcgcggacggaaccgcgctcgatgagttcggtggggattacggttttgatgccggccggtactttctcgccttcgcattgacggcggaccatggagaacgcggtggcgccgatggcgtcattgcgcatgcgcatggtggtgaggttgagtcttggcaccacgtcgaccagcgaatcgtccacgcccacaatgcttacgtcttccggcacgcgcttgccggctgattccaatccgagcatcgcaccgtaggccatctggtcgttggccgcatagattgcggtgcattccgggtcgtgagccagcgccacgcctgcctgatagccggagtcggcacaccagtcgccgatatacatgctcggtacgcgcgcgcctatttgttccaaggcttcgcgccagccttgcgctcggctttcggcagcacgtgaagtgactgggccggcgatatggtagacggtcttatggcctttgctcatcaaatagtcgacgatggctgtggaacatccgtattgatcggcgtcaacggtggggcagtggtcggctgccgcctcggaaatcagcacaaccggtagttctcgcggtggtttgtatcccacgaagtcggaaatgcgttcctcaagcaccacgatgacgccatctacgggttgacgttgcatgcggtcgatggcggaggccagcgtacgttctgcgccgttgctcatagtctgaatggtgacggaatagccgtcctcggctgcatgggtgacaatggaatcgagtatccgggcattaccgaacctggtggtgtcgaacattactacgccgatatcctggaatcgcccatgcttcaatgctcgggcggcgtaattcggacgatatccgaggcgttccatcgcggcttcaacgcgctggcgggtttccggcttgaccgcattgctgtcattcgccacacgggatacggtttgcggcgaaacgccggccgccttagccacatcttgcatggaaacctgtgttggtctcgccatctcgcccctcgcttgtctctcaaacgacagcggtcataccgctgcgatgtctaccatgtatcgcgtgaacggtaacgataacatcattgttttcgtgaccattgtaacagctagcgcagaaacattgaattcaacacgattggacaatgttatgaatggtgttatgatgatagcgcaaacaattttggtcaaccttcgaaggagaggggttggaaatggcttcagccgatgtcgctgccgtgcccatgcgcacggataaagcgcgtgagaacaagcataaggccgattggcgtggatggaagttcatgtggccgttcacggtggtgttcgtgttcgtgttcattatcccgatcgtgtacgccgtttacatcagcttcttcaagaagcagatgatcggcggcacgaggttcgtcggggtcgagaactacgcgcgcctgctgcaggacggccagttctggtcgtccgtgggtcgtgtggcgctgttcacctgcgtgcaggtgccgatcatgctgttcctgtcggccgccatggccctcgccctggattcgatgaagctgcacggcgccaagttcttccgcatcagcacgttcctgccctatgcggtgcccgcggtggtgtccacgttggtgtggggcttcgtgtacggcgcgaagtacggcctggtgggctcgttcaacgacttcttcggcacgaacatcgacgtgctgcagccgagcgtgctgcttgcctccatcggcaacatcagcacgtgggagttcaccggctacaacatgctgatcttctactcgtcgctgtccaccatcccgcactccctgtacgaggccgcgtccatcgacggcgcctccgaatggcagatcgtcaagtccatcaagctgcccgagctgaagggctcgctggccatcacggtgatcttctcgatcatcggcagcttccagctgttcaacgagccgagcatcttgcagaacatggttccgggcaacgcgatcaccacgtactacacgccgaacatgtacgcgtacaacctgagcttctccggcaaccagtcgaattacgcggccgccctggccatcgtgatggccgtcatcaccatggccatcgcctacgccgtgcagctgaagagcatgaaggagcagatgaagtgacgatgaccgcccgtatcgccggattggtttcgattgtgaaggagcgtgcgtgatgagtgccgcagcatctacccgtttgaccgacgccgaactgaaggcgcgggagaaggccgccaggaaggccgagaaggaacgccagaagcgcatcgccgccgacgaggcggccgagcgcaggcgcagcgccaaggccggtttcgcgaacgtgaacaacccgcgccgttcgaccctgatgaccgtgctgtgcgcgatcttcgccgtgtactgcctgttcccgttcgtgtacctggtgatcaacgccaccaagacccaggccgacttcacctccacgttcggcctcggcttcggcaagagcttcgccctgtgggacaacatcgccacggtgttcacctaccaggacggcatcttcggccgctggctggtcaacaccctgctctacgtggtcgtcggcgccggcggcgccaccctcctggccatcatgggcggctacgcgctggccaagttccgcttcccgggacgcaaggccgtgttcgccgtgatcatcggctcgatctccgtgccgggcatcgccctggccgtgccgcagttcctcctgttcgccaagctgggcctgaccaacaccccgtgggccatgatcatcccgtcgctgatctccccgttcggcctgtacctgatgtggatcttcagcgagcaggccgtgcccaccgagctcctggaggccgcccgcgtggacggcgcgtccgagttccgcacgttctggaccatcagcctgccccttctggcccccggtatcgtgacgaccgccctgttcacgatcgtggcgacgtggaacaactacttcctgccgctgatcatgctgaaggacgccaactggtacccgctgaccatcggtctgaaccagtggaaggaccaggcctcgaccgcgggcggccaggccatccagaacctggtgatcaccggctccctgatcacgatcatcccgctggtcatcgcgttcctgtgcctgcagaagtactggcagtccggcctcgccgcaggcgccgtcaaggagtaaccgtgcttcggctcccttctggtggggggagctgagataaaggcataaccactaacaggaaggaggcgcctatgcagatattcgcattgttgagaatcgtgcaggcgcctccttgcgtatctgcgtgactcccatttgcccacacgtagatatttattcattaaaggaacagcatcatcatggaacatcgcgaattcaagtggccgcagcctcttgcgggtggcaagccccgtatctggtacggcggcgattacaaccccgaccaatggcctgaggaagtgtgggacgaagatgtggccctcatgcagaaggccggtgtcaacctcgtctccgtagccatcttctcttgggccaagcttgagcccgaagaaggcgtgtatgacttcgattggctcgaccgcgtcatcgacaagctcggcaaggccggcatcgccgtcgatctcgcctccggcaccgcatccccgccgatgtggatgacccaggcccacccggagatcctctgggtcgactaccgcggcgacgtctgccagcccggtgcccgacagcactggcgggccaccagcccggtcttccttgactacgcgctcaacctgtgccgcaagatggccgagcactacaaggacaacccctatgtggtctcttggcacgtgagcaacgagtacggctgccacaaccgcttcgactactccgaagatgctgagcgcgccttccagaagtggtgcgagaagaagtacggcaccatcgacgccgtcaatgacgcctggggcaccgccttctgggcgcagcgcatgaacaacttctccgagatcatcccgccgcgcttcatcggcgatggcaacttcatgaacccgggcaaactgcttgactggaagcgcttcagctccgacgccctgctcgacttttacaaggccgagcgcgacgccctgctcgagatcgcccccaagccgcagaccaccaacttcatggtctccgccggcggtgccggcatcgattacgacaagtggggttacgacgtggacttcgtgtccaacgatcactacttcactcctggcgaagctcacttcgacgagctggcttactcggcctccctgtgcgacggcatcgcccgcaagaatccgtggttcctcatggagcactccagctccgccgtcaattggcgtccgatcaactaccgtgtcgaacccggcgaactggtgcgtgactccctggcccacctggccatgggctccgacgccatctgttacttccagtggcgccagtccaaggccggtgccgagaagtggcactcctcgatggttcctcacgcgggccccgactcccagatcttccgcgacgtgtgcgagctgggtgccgacctcaacaagcttgctgacgagggcctgctgagcaccaagctggtcaagtccaaggtcgccgtcgtcttcgattacgagtcccagtgggctacggaacacaccgccacgcctactcaggaggtacgccattggaccgagccgctcgcgtggttccgcgcgctggcggacaacggtctcaccgcagacgtggtgccggttcgcggtccctgggacgagtacgaagctgtcgtgctgccgagcctgaccatcctgtctgaagagaccacgcgccgcgtgcgcgagtatgtggcgaacggcggcaagctgttcgtgacctactacaccggtctggtggacgacaaggatcacgtctggctgggtggctaccccggctccatccgtgacgtggtgggcgtgcgcgttgaggaattcgccccgatgggcaacgacttccccggtgccatggaccacctcgacttggacaacgggaccgtggcgcacgatttcgccgacgtgatcacctccgtggccgataccgctcacgtggtcgctgcatttaaggccgataagtggaccggtttcgacggcgctcccgccatcaccgtcaacgatttcggtgacggcaaggcggcctatatcggtgcccggcttgggcgcgaaggtttggccaagagcctgcccgcgctgctggaggaactcggcatcgagacctcggccgaagacgatcgcggcgaagtgctgcgcgttgagcgtgcggatgaaactggcgagaaccacttcgtgttcctgttcaaccgcacccacgatgtggcgattgtggacgtggacggcgagccgctggtcgcctcgctggctcaggtcaacgaatccgagcatacggcggccattcagccgaacggtgtgctggtggtaaagctgtaaagaggtctatttatagcgattcaaatgcgatggcgggcgtgttagcgataacacgcccgccatcgcatttgcgatttgttttgagatgtgtatactaaaagatgttatcgcaaccatagcgaaaggaatggcttcatagagccacttctcagtgtcgaggagaaatcaataattgacactaggtaacacgcaatgattgcgagcgacaaaacagtttgaatcgttctagacgattcgaggaaggagaacagaacgatgaagttcactaccgccaagaaggctgttgccctcaccggtgcggttgccatgctggtttccgttgccgcctgcggctctgatagcggcaagtccagccagccggctcaggattccgacgtcaaggaaattaccgtctgggcttgggagccttcgctgacccaggttgccaaggacttcgagaaggagaccggcatcaaggtcgacctgaagaacgtcggtaccaacaccaaggaatacactcagctggacaacgccattgaggctggctctggcgctccggacgtcgctcaggttgagtactacgccgtcccgcagtacgccatcaagggcaacctgctggacatcaccgacaagacctctggctacaaggacttctacacccctggcccgtgggcttccgtgcagttcgccggcaaggtctacggcctgccgatggattccggcccaatggccttcttctacaacaaggaagtcttcgacaaggccggcgttgatgccgagcagatcaagacctgggatcagtactacgacgccgccaagaagattcacgccctcggcgacaactactacatcacctccgacaccggcgacgccggcttcttcgactccatgacctggctggccggcgccaagccgttccagacctcctccgatggttccgaagtcaccgtcaacctgaccgaagacaagggcgtcaagaccttcaccgacttctggcagaagctgctggacgagggtctgctcgacaccaagaccgccggctggtccgaggattggttcaagggcatggtcgacggcaccatcgcctccctgttcactggcgcttggatgcctgccaaccttgctaactccgctgctgacggtgccggcaagtggcgtgtgacccagatgccgaccgctgacggctccaccaccaactctgagaacggtggttcttcgctggctgtgctcgcctccaccaagaaggctgatgctgcttaccagttcatcgagtacgccaaccacggtgctggtgtggccactcgtgtggctggcggcgccttcccggctgacaaggcctccttggaaaaggactccttcaagaacgccaccaccgtgaagaacgccgatggtcaggatgttgactacttcggtggtcagaagtacaacgaggttctggctcaggctgctgagaacgtgtcctccggctaccagttcctgcccttcgaggtcaaggcccgcaccatcttcggcgactactttggcaagtcctacaccggtgaccagaagctgagcgacggtgtcgctgcttggcagaaggccctgcaggattacggcaaggatcagggcttcaccgtgaagtaagccttataactccctctctatatatccaccgcagccccgtgacgcatctcgccacggggctgctgccgtatcttggctcccgctggcaagagctggctcgcgaggcgagactgagggtggttcatcatacggcgttttaagccccgcctagtagactcgtcaccatgcgaacaatcggacggcgaatcagcagactggcgaccatagtcgtggccgcggtccttaccgtatccctggcctcctgcggccaagccacggtcgataaccgtaccgaaatcagcgtatggagctgggaacccagcatgggcgaagtcatccgccgtttcgagaaagccaatccggacatccgcgtcgaatggaccaacatctccggctatgagaatctcaataccgccatccaggacggctacggcacgccggatgtggcgcagatcgaatactacgcgctgccgcaatacgaggtatccggccagctgctcgacctaaccgatcgtaccggattcgattatgcgagtttctttacccttggcacctggtcgtccgtccagcttgccgggcgagtgtatgcattgccgatggattccggccccatggggttcttctacaacgaggatgtgttccagcaggccggggtggatgccacgcaaatcaagacatggaacgattattacgaggccgccaagaaactcaagcaaattggcgcttatattgcggccgattcgggcgatggcagcttctacgacgccatgatatggcttgcgggcgggcagcctttccatacctcgccggacggtaaaaccgtgaccatcgatctggaccacgataccggcacccagctgttcaccgaattctggcaaaagatgatcgatgaaggcctggtggacaccacgtccgccacatggtctgagcgatggaagcgcagggtgggcaccggcaccattgcttccgtgttctccggcgcatggatgccttcgatgctgctatccaatgtgcccggcgcgtccggactatggcgtgtggcgcccatgcccacctatgacggccagcctaccaatgccgaaagcggcggatccgcacttgccgtgttgcagctgacgcgtaagccggatgcggcctatcgattcgtggatttcgtgacccatgacgcgcagggcatcagtgcccgtgtggctggcggtgccttccctgccgactatgacaccctcaattccggtgaattcctcgataagaccacgatcacgaacgatcgtggcgtcgaaattccgtatttcggcgggcagaaattcaaccgtgtgctttctgaagcggccgaggatgtatccgtgggatatcagtatctgccgtttgaagtgtatgcacgtaacgatttcaagagcacggtaggcaaagcctatgaatgggccagcagcaaacaggcctacgaacagcgtgagatggaagtcgatatgggcatgaaagacgagaaaggcaagccgctggaatcgttggacaggcctggcaagaaagtcagtcttgaacacgggcttgccacttggcagaaagatctcaaggaatacggcttcaaccagggcttcacgattaagtagctcctcgctaacctccctctgacgagggaggtggccgccgaaggcggacggagagagacctgagggaaggcctagctaaaggccgatttcgttacttcacattgcgggcgtagatatgcgccatgcccttgaagatgagatccgggtcatagacgtcaatcagctcggtatcataggcgaacacgcgcccaaggccaccggtggtgatcaccttgaagtcctcgccgccaagctccttgcggaactggctgattgtgcgttccacgccgcccaggaacgtgtaatacaggcctgcctgcatgcaggtcttggtattggtgcccaaaatggtctccggtcgggtaatctccacttccggcagctgggccgtgtctccccatagggcggcggcgcctgcacgaatgccggtggtgattacgcccgaatcgaccatgcccttatcgctcacatgcgtgaacgtggtggccgtaccgaaatcgaccaccagcaccggaccgccatactcgtaataggcgccggcgcagtcggccagaatgtccgcgccgagtgatttcgggtcatccacgcgcacgttcatgccggtcttgatgccggggcccaccaccatcgggtcgatatccaagaacttgacgatggaggagcggaaggaatgcatcaccttcggcaccaccgaacagatgatcacgtcatccacatcggatggctggaaaccgctcattctcaggaattcggtcaaaaacaggccgtattcatcggatgtatggttggctttggtggtgatgcggtaggttccggcgatggtgtcgccatccagaaaaccaagcacgatgttcgtattgccgatatcaacggcgaccagcatgataaccctccagattcaagatggatttcatgtgcaattctacagccccgcagctatgatgggctgtggtggacgacccgtttgtggcggccaaccgtataaaccaacatatatagaggaagaaccatgtctcaagacaatggtgcgcacgtcgaagacggcgcaaccacagatgcgagccttgcctcgcgcgcaaagaatccgaagaagaacagcccgaagtggtggctgattgccttggccgttgtcgtggtggtggcggttatcgccggcgccgccttcgccttcggcggtaagaaagactccaagaacgcggcctcgtccggtacctatgccgacaccgtgaccatcggtctcaaactggcccccaccaatctggacattcgcaacaccgccggctccgcgctcgaccagatcctgatcggcaacgtgtacgagggtctggtggcccgcgactccaagaaccaggtcgttcccgccatcgcctccagctgggagacgtccaaggacggcctgacctataccttccacctcaacaagaacatgaccttctccaacggcgacaagctcgacgccgaagacgtggcctggtccatcaacgaactcatcgccaaggattatcacgacgccgacgcgctcgctgccgtcgataaggtcgaggccaaggacgccgacaccgtggtcatcacactcaagagcgcgaactccaacctgctgtggaccctgaccggccgccccggactggtgttcgacaaggatgccaagtacgacctgaagacccaggccatcggctccggcccgtacaccgtctccaagttcgtggagaacagctcgatcacgctgaagaccaacgagaaatactggggcaagaacaaggccaagacgcccaccgtggtggtcaagtatctggctgatgacaacgccgcggtcaacgccctgaagtccggcgatgtgcaggtgctcgccccgattaccgagaacctcgccgagccgttcaagtccgattccgcgaactacacggtcaaggccggtgacggcaccgacaagttcgtgctcggcttcaacaacgcctccggttccaagttggccgacaagcgcattcgccaggccatccgttacgccatcaaccacaaggaactcatcgcctcccgtggtggcgccgacaaggcgctcggcggcccgattccgtccctcgaccccggttacgaggatttgaccaacctgtatccctacgatcagggcaaggccaagtcgcttatggctgaggccggttactccgccgacaagccgctggaactcagcctgacctacgccaacatttatggcaccgagctcggcgaccagctgcgttcgcagctgaagcccatcggcattgatctgaaggtcaacgtggtggaattctccacctggttgcaggacgtgtacaccaaccacgatttcgatatctcactggtggaccacaacgaaagccacgacttcgcttcctggaccgacccgacctactacttcggctacgacaacaaggacgtgaccaagctgtacaacgagggcgtggccgccacttccgacaaggagcgtgacgccaagttcgccgaggccgccaagttggtgtccgaggacgccgctgcggattggctgttcaattaccgcaccaccaccgccacggccaagggtgtcaagggcttccccctcaacctcaaccagaccgtcttgcccctctataacgtgacctactccgtcgctggattcagccagaagtagttacgttttttcgggctcccgctggcgggagctgtccgcgaagcggactgaggatggcctcagtcatcctcctcctatgacctctcctcagtcgctgcgcgacagctcccctcagagagggggagccgtcaccgtaggcgactgaggggagccaaaggaaagtaaccccgagtaaagtaggcattatgcgattcgtgctcaaacgactggcgttgtttgtcgtagcgctgctcggcctgtccgtggtgattttcgcggcattgcgcattctgcccggcgacgtggcctccgtgatggctggcgtcaactcgccgcccgagcgcgtggcccagttgcgcgaacagcttggcttgaatcggccattagtcgcgcaatactttgattggatgggtgcactgatccatggtgatttcggcacgtccatcctgaccggtcgttccgtaacctcactggtcggctcgcgcgcagccatcacctttcctctgatcattcttggcatgttgattgccttggtcattggcctgccgctgggttgtgcagcggtgctggctcgctccgagcgagtgcgttccgtattccatgtgctggccatcatcggcggtgccatccctgctttgtggggtggattgctgctgattctgctattcggccgtggcgtcggactgattggcgtcttcccttcgcaagggttccctctggacggttggggagcgcccggttcggcgatgctgtcgttgattttgccggcgttgtcggtcggtgtcatcgtgggcgcgaccatcatgcgatacacgcgttcggctctggacgatttggccggttccggttatatcgacatggctcgttcctgcggcatgacccgcacccaggcagtgctgcatgtcggcctgaggttggcgaccccgcaactggtgtccgttatcggactgacgttcgcctcgatgatcaccggcgtgatggtcatcgaaaacctgtttgccctgccgggtatcggcaatggtctcgtaaccgacgtgggcaatcgtgacctcatcgccgtgcagagtgagctgtttttgctggctgcattctttctgttgattggtcttgtggtcgacttgctccaccgcgtgctcgacccgcgcctcaaaaccgccgccaccattacggaggtgaccgcatgagcaaatcgtctacttccttctcgccgtttgcagtcgagggggagcgtgttcccaatcctcccgctgatgtgaggcggcgtcgcaccgcgatgccggaggggggtcaacgagcggctttcgcaatcgtcctccactccatgtggcgccgggccgaaggcaaattcgcgcttatcgtgctcgcctcatggctgctgatcgccatcgtttctttgttctggaccccgcaatccctatgggccaccgacggctaccacgtatgggctaaaccctccgctgcgcattggctcggcaccgacggtaccggagccgacgtgttcagctggctgcttgccggctcgcatacgaacctgctcatcgtgctgcttaccgtagtggtttccgccgcttgggggctgctgctcattgcggcgatggtcgcacgcaatgcggcgcttgccagctcgtctgtagtggtggtcgatgcgctgatctccattcccactgtgcttatcgcgctgattcttgctgtaccgctcggtgcgtccatcgtcgtgattgtcatcgcttgcggcttcggatacgggctgaatctggcacgtgtggcccgtccggcggcgttgctggcggcccgttcatcgtatgtggaatcggccctggcgaatggagccagcggatggcgtgtgttggtgagccatatcgtgccgaatatcctgcccgtgctggccgtacaactgtcactgtccgccggcacggcggtgctggccgaatcaggacttacgtacctcggtatcggtgtgccgtcgggtgtgccgagctgggggcattcactggccacatcggtcaagctcatcaatgtgtttccgctgaccgtggtgtggcccggtctgattgtcactctcgtggtggtggccctgaatattttcggcgatgtgttgcgtgatgccatcgacccggtcgccaatcccgcgttgagggaagcaggggagggcggcgatgagcgttgatattcatggtctgaacattgctgtcggcggcagattaattgtttccgatgtggacttggccattgccgatggcgagcgggttggcctaatcggttcctccggctccggcaaatcgatgatttccaaggcgatactggggctgctgccattgactgctgcagccgacgggtcgattgatatgagcggtacgggaatcatcggtgcctctgagcatgtgctcgccgacctgcgtggccggtatgtgggcgcggtatttcagaatccggctgcttcactgaacccagtgatgactgtcgcccagcagatttctctgccgctgaaattgcattacgacctgaccaaggccgaacgtgccgaccgagtgaatgccatgctggacaaggtcgggctggaccgtgatatggccggcaaatatccgcacgagttgtctggtgggcagcagcagcgcgtgggcatcgccacggcgctgatcacctcgccgcggttcatcattgcggacgagccgaccaccgcgttggattccatcacccagcgacagattgtggatctgctggtctctctagtggacgatgccggtgcctcgatgctgttcatcacccatgatttctccgtgttggcacgtgccacaacgcgttgttatgtgctggacgctggccgcattgtggagtccggcgcgaccgccaatctgcttgccgcaccggccacgctacaggcccaacgactggtcgccgccgcccaaaccctcaccctccgcactcccaaggaggattctcatgagtgatggcaataggttcctcctctccgcccaatccatcaacaaatccttcggtccccgctccgcgcgccgccaagtcctcttcgacgtctccgccgacgtccgccctggcgaatgcttggccgtcatcggcggttccggttccggcaagtccacgctgacccgcatcatgctcggcctcgaatccgccgattccggcactgtgacgtatggcggtcaatccattgccggtggtcgcagatcatccggtgtgcaagcgctccgccgcgaatcgggactggtgtttcaggacccgttctcgtcgcttgacccgcgttggcgggttgctcagtcagttgccgaaccattggtgttgcagcggcatgacctcggtaaagccgaaatcgctgagcgagtggccgcggctctgaccatggttggccttgaaccggccactttcctgaaccggtatccggtcgacttgtccggaggtcaggcgcagcgcgtggttatcgcgcgagccatcatcaacgagcccaaagtgattcttgccgacgagcctatgagcgccatcgatgtggccgcgcgtatccagattctcgataccttcgccgccatccgtgaaacacgtcgtgaaacagcattgatcatggtgtcccacgacctcggcgtggtgcagcatatcgccgatcggattctcgtgctccacgatggtcgcgtcgaagaagaaggctctaccgccgaagtgctcggcagtccccagtccgactacacccgccaactcatcgaagccgcctcgttgtaactcctctcggctccctcatgaagggacggcagaatcgttgccgactactcacgcccaccatatgaacgcccgcgacacgcagttgtcgcgggctgtgctatggtgtgagacatgcagattatctcatgttgttgtcgctaaccgacgcccctaggcgagcggtcagtgacgcataacttgagatagagcattcaatcgcggcagatttgccgcaaaaattcgtggaacctttggcataggcgcaaccgtgtaacgcgcaagctgtgggccgtatcggattcatcactgaaatactcgaatttcaaagcacaaggccacagtccattcgtctgggaacgtcggttcacgaacgcaacgcagcaaaccccaaccccagcaacaaaggacttcaaatgaccatccacaacagcctcgccgaactcatcggcaacaccccgctcgtcaagctgaaccacatcccgcagacggccggtgtcaaggccaccatcgccgtcaaagtcgaatacttcaaccccggtggctcatccaaggaccgcatcgccgagcgcatcatcgacgccgccgagaagtccggcgagctgaaacccggcggcgtgatcgtggagccgacctccggcaacaccggcgtcggtctggcactggtcgcccagcagcgcggctaccgtacgatcttcactttgccggacaaggtctccgaatccaagcgtgcggtgctgcgcgcctacggtgccgaagtcatcgtcacgccgaccgatgccggccccgacgacccgcgctcctactaccaggtcgccgaacgactggccaacaccattcccggcggtttccgcccgaaccagtacgacaatccgaacggtccgctgagccactactacaccaccggaccggaagtttgggaggccgctgatcacaaggtcacgcatttcgtagccggcatcggcaccggcggcaccatctccggcaccggcaagtatctgaaagaagtctccgacggcgcggtcaaggtcatcggctccgacccggaaggctccatctactccgccgcctcgcgtgaggaagtccaccagtacgacatcgagggcgtgggggaggacttctaccccaaggctttcgaccggaacatcaccgatgacatcgtgcgcgtcggcgacgccgaagctttcgaaatgacccgccggttggccggcgaggaggggctgctggtcggcggctcgtccggcatggccgtggccagtgccatcaagtacgcgctcgccaacgatctggacgaaaaccagatcatggtggtgctcgcccccgattccggccgtagctatctcgaaaagatcttcgatgacgactggatgcgcgccaacggttacggcgacgtggtcgaccgcaccaccaagccgtcccttgccgagcagtacctctaaacgctaagtgctcccctcagtcgcttccgcgacagctcccctcggagaggggagccaaaaagggctctggcgcccctctttgaggggagctgtcagccgaaggctgactgagaggagccagcccgcaaagatccaataactttccaaacccgtccaatacccaaccaaacaccaaaggaaaccaacaccatgtccgctgaatacaacgccaagttcgccaacaccgccgtcgccacccgcgccatccacgccggccaggagcctgaccccaccaccggtgctgtggttacgccgatctacgccacttccaccttcaagcaggacggcgtgctcggcctgcgcggcggccacgactactcacgctccatcaaccccacccgcaccagttttgacgagcagctcgccgccgtggaaggcgccaagtacgcgctgagcttctcctccggccttgccgccatcgatgtgttgctgcgttccaccatcaagcccggcgacaacatcctgctcggcaacgacgtgtacggcggcacctaccgtctgctctccaaggtgttcgtgccgtggggtgtgggcctcgatgtggtggacatcaccgacaccgccgccgtggaagccgcgctcgccgccaagtcgtacaagtatgtgtgggtcgaaaccccgtccaacccgctgctcaacatcaccgacatcgcagtcacctccgaagtggcccataagtacggcaccaaggtggtagtcgacaataccttcgcttcgcccgccttgcagcacccgctcgatgatggtgccgatgcggtggtctactccaccaccaagtacatcggcggccactccgatgtggtcggcggtgccgtggtgctcaacgatgaggaaacccgtgagcaggtggccttcctgcagaacgcagccggtgccgtgccttccccgttcgattcgttccttgacattcgcggcctgaagactctggatttgcgcgtcaagcgtcacagcgccaacgccctgaaagtggcggaatggctggaatcccagcctgctgacgtgattgagcgcgtctggtatccgggcctcgaatcccacccgggccacgatatcgcggttcgtcagatgcatggcggcttcggcggcgtgctctccgtgcagcttgccggcggtgccgaggctgccaagaagttcgtggactacaccgagatcttcacgctggccgaatcgctcggcggcgtggaaagcctgatcgaggtgcccgccgctatgacccacgcctccgtggccggcaccaccttgcaggtgcccgccaacctggtgcgtatctcggtcggcatcgaaaacgccgatgacctcatcgccgatctcaagcaggctctcgaccgtctgtgacggagacgctgcgagccgttctcggaacgtaacttcggtgattctccgtttcaaggggcggatttgcgctatcccggacatctacttccgtttcaaggggctgttgcccaagtaaacaaggcgtgaaaacggcggaatggcgttgggataatgtcatttgtatatgttgtttagctgatgaccagccccttgaaacggaagtagatgtccccgaaacgtccaatccgccccttgaaaccgatttacggataattgaacaggcatacatgacttgtgaccgcggcagtgcggtatggttgggaagcatgacggcacatgaggcggcgctgggggcgctcaagcaatacttcggttacgattcgttccggccaggccagcaaggcatcgtcgatgctttgctggatggccgggacgtactgggcgttatgcccaccggtgccggcaaatccgtgtgctaccagattcccgccgcgctgatgcccggtgttaccatcgtgatctcgccgctgatctccctcatgcgtgatcaggtcgatgccctgaatgatttgggcttgccggccgcattcgtcaacaccacccaaaccccggatgagcaggccatggtgttcgcccaggctgcggcgggtcagctcaaactgctgtacgtggctccggaacgattggaaaccggccgattccgcgacttcgccgcccgcacgccaatctccctgattgccgtggacgaggcacactgcgtctcccaatgggggcaggatttccgttcgtcataccttggtattggcgacttcatcgtcggcctacccaagcgcccgccggtcggcgcattcaccgccaccgccaccgagcgcgtgcgccgcgacatcgtgggattgctgggtttacggaatcctgccgtcaccgtcaccggattcgaccggccgaacctgtatctcgacgtggtcaagctggaaaccaaatacaaggccgcgtgggtggcgaactatgtggctgcccacccggacgaatccggcatcatctactgtgccacccgcaagaccaccgaggcgctcgcagctacgctgaaccagatggggcacgcggcggtcgcctaccatggcggcatgtcgtcggacgcgcgtgaagcggcgcagcacgacttcatcaccgacaaggtgccggtggtcgtggccaccaatgcgttcggtatgggtatcgacaagtccgatgtgcgatacgtcatccaccacaacttgccggaatccatcgaggcctattatcaggaggccggccgcgccggacgtgacggcgagcccagccgctgcacgctgctgtggaacgaatcggatatcgtgacccggcgccggctactcgacagcgattatgagaacgagcgcatgacccccgaagatcaggaaatcgtgcggcagtccaaacgacgcctgctggatggcatggtgggctattgccgcaccgccgattgtctgcaccggtacatgacgcggtatttcggacaggaaatcacgccgacggatgcgccctcggatacgcatgaggacaagtgtggtgcctgctcgaactgcgaaagtactttcgagaccatcgacgtcaccagcgttgcccaggcgatcagccggtgcgtgcatgatgtgaatcagcgggtcggttccggcaaaatcgtcaagattctacgcggctccaaagcgcaggacctggcatggctcaatccggaacagatgcctacgtttggcatgctcaaggatgtgaacgaggcttgcgtgcgcgatgtgctgagtcagatggccaccgatggctacctgttcatcgccgaagggcgtatgccgattgtcatgtttggcgcgcgtgctgctgaaaccgccgcgccggatttccattatgaaatcaaacgtgtggagcgtaagtcggcttcggtaagtagtcgacatgggggagtggccagcgaatcagccagtgcttccgctgcaatggaatcctatattcctgacgatgacgaggaggcgctgttccagaagctgcgcgaactgcgtcgcaccatcgcccaggaaatcggcaaaccgccgtacatcgtcttttccgacaagacattgcgagacatggcccgtatcaagccgattaccaatgcgcagtttttggctgtcaacggtgtgggccagcacaagctcgacctttacggcaagcgctttatggaagccgtcgcctcgtttaacgccgggaatgcgcaataaccattgcctatagcgaatcatggggtatttccgtgtattcccgtgtgggcgcgactacgcttgctaagcgatacggcatgtgaacatgcaaatgtgtagaaaggaagccgagcatggcagaggaaaaggctgagaagcccgtcgttgaatcattccagctggatcacaccaaggtcaaggcgccgtacgtgcgttacattgacacggaaacgggtcctcacggcgacgtgatttccaactatgatcttcgtctgacccagccgaacaagcaagcgattcccaccggcggcctgcacaccatcgagcacactatcgccgtgttgctccgtgagcgcatccccggctacatcgactgctcgccgttcggctgccgcaccggctttcacttgctgacctggggcacgcactccactgaggatgtggccaaggcgctcaaggaatcgctggaattcatcgcttacaaggccacgtgggatgatgttcccgctaccaccgagaagagctgcggcaactaccgcgaccacagcctgttcaccgccaaggaatgggccaagcagattctcgaggaaggtatcagctccgacccgtttgagcgcaaggtcgtctgacctgattaggtgttatacgaacccctgtccgccatgtaacgcggacgggggttcttgtgcctatggcatggtaggtttaccgtcagttcctgtactggtgattgccctatgagagaggtgggaatgactcagccgaacgctgcgaacaaggcgacgtctcgtcgtttccgccacgccaccatgcgtgatttgccgcatatgcagaagatttacgcgcgtgcccgtgagctgatggcggccaatggcaatcccacccaatggggcaatgagttcccccgcgaatccgtgattgaagacgatattgccaaccagcgcacagtgctgctggtggacacctgcaacggccatgagcgtattctggctcagttcgcattgtgccctggtgaagatccgacttatgcgcatatcgacggtgcatggctggatgatgattcgtatgtgacgattcaccgcattgcctcgtctggacttgtcaaaggcgctgccaaggactgcatcaactggtgcatcgagcattatggcaatgtgcgtgccgacacgcatcccaacaacaaggccatgcaacatgtgctcgaatcgaatggtttcgcgcgttgcggcttgattcagttgcttgacaggccgtccgacaccacgcgtatcgcttatcagcggcatgaatggtgatggatctcttgccctcggtaatctaaaccccatcaaactaccgacgctgggatggtgctgaccatcggcgggtcggagatgatttatcgctgtaccacggatcctcgatcgatgagcgtcggatccagatacatgcgatgtaccggctgatcgggtgattgaatacggcttagtagtgtatgtatggcacaggctgccaattcctcttcatcggaacgcagtaccgtcagagggcgcgagcttggtgtggcgaagccatctatagaaatcagcgatatgtcgtcaggtatgcgtttcccttgattttcaagggcttgagctatggcgatggcaagataatccgagtgcaccagtagtgcggtgatatcggatcggatgatggtctcgacgatggtctttacgccagcggtgtcatagggcatcatgccagtcaagacaaacgggcattcgatccgcggtgtttgttcgacaatatcctgccagcttcgctgaatgatggctgatgtgggagtttgactgaaggttgcgccgatgtgtgtatgtccatgcgcaagaaaatgggataccgctttacatacgccgcggcgatggtcggtctgtacggaatccacgtaacgtgtcgtgagcagcggctgctcacgttccagaaccaccgtgggaatcgttgtcgtttcgatccactgccatgcatgttgccctaaatgggggtgggagttcggagcggcaataatgccgcagactctaggggcgtcggcaagctcttgcaatatgcgttcctcgtgcatgttctcgtcgtaggagcaggtgcggatagtcaacgatatgcccgattcggctgcgatatgcttcatatggttcacgattcccggccagaagaagcttggttcgggcaccatgacaccgatgctggtgttttccggcgtgtcgggtccgggaattgcggcgttgccggccggggtgggctccttgatggtgccaatggacattgcgccaccgcggatacgtttgagcaggccggctctggctagtgcgttaagatccctgcgtacggtgatttccgtggtttccaatgaggtggcaagctgcgtgaccgtgaccacttcgtgctgtgtcagcagattgaggatcatgttgcggcgttcgtcgggtagatagtctcgttgctctgcgttcagtgccatgatggtgtgccccagtcttccttgccttgtctaatacgtatattatacgaagtctatagtcgattgattctgatattttttaatcgaagatgattgatactgataaggtacgcttgattccataacgagtgccgattccaagggaggaatagagatgctcgatgatagtgaactgctgtataagggccttgaatggagcaatgcgcagacgatatgggtcgacccatcgtcagcgggcgatgatgatatgaaagcagctgcggattttcccgataataacaacggcaacgagtcgtcgggcgatagctattttcgacagccgagcatcattcagtccccggacaatggccgaggatgggcttttctgcggcatgaattcacattgccgagcacgccggtgcgcaaagcgacgctctatgcgacggcttcctcgactaaaccctccagacaattcgtgtatcgcatgtgggtgaacggttacttcgtcggcctgggaccggtgtttccggtagagaatgaatcgcgcgtcaacacattcgacgtaaccggattgctgcaggccgggccgaatgcgatgggcgtactggcctggacgatgcgggaacgccgattctgggcctatatggaaatcgtacttgccgatgggtgccacatgacatatggaaccgggtccaactggaagggtatcgtcggcaatcgtgcctatccgaatgccgattcgataggaacgcaatatttcgaagcgccggctgaggatatgcagacgcaatggtacccattcggtttcagcgagccgggcttcgacgacagctcctggcccaaggctgtgccatgcgagcaattcgatgacctgcggctaacgccgactgcgaacgtcggagtgcattaccttgaccccgtcgctacaagaatcgatgatcgaggaacgctgattcttgactttgggcgcacttgcgtgggcggaatctccttggatgtcgaatcgcttcacatcttggaaaatattgatgtgcgtatccgctatggcgaggtgctggatgacaatggtaatgtccgttaccgcttgagcacatttaatacctatcaggacagctggcatatcaccccgcagactccagcagtggagacttggggtatgcgggtattccgttatgtgcagattatccctgctcagactcaggcctcgcaagatgcggtttgcgccgctgcctcgtcggtgagggccgcggctattgagtatccgttcgatgacgatgctgcgggttttgtatgcagcgataagaccttgaatgaggtctggcgtttttgccgtaatagcatcaaagcgctgaatggtccgatttacgcggattcgtggacccgtgagcgtgcaccttacgaagccgatgcatggttgcagcagcgctcgcatttggcactggactgcggggctgatgcgattcggcttggacggtacagtgttgattggctgatcgcgaatcgtacgtggcctaccgaatggccgttgtatttgattctggccgtgcatgattcttggatggccagtaatgatgagttgcagattcgtaggcaatatcaagcgttgcgcgcattccttccggaacggtatgtcgatgaatcgagtggtttgattgtcaaggagccgggggaggccggccatatggatggtgatttggttgattggcctccggctgagcgtgatggcttcgtattcggcccagtgaatacggtaatcaatgcgttgtcttgtgcggcctaccgggccatggctgatatggcgcgtgtggttagcgatgctgctgatgctgtgcggtatgctgggcgcgcttcggcattggaatcggcgattaatgcgcgattgtgggatgatcatgcgcagtgctatagggacggtttgaacgcgcagggggatcagttgcagcatggttctcttcatgcgaatgcatttgcgttggcattcgtggacgtccctaaagatcgtcgggcaatggtcgccgattatattcgtaataagggcatgtgctgcagtccgtatgtagctgctgtgttgcttgagggcttgtataggaacggtttcggtgctttggcgaatcgtatgatggccgatgacgatccgaggaacctgcattcgtggcatcacatggtgtctaccggctgcggctcgactatggagggatgggatgtgtccattaagggaaataccacgtattcccatccttggtcggcgtctcctgcatatctgctggagtgggggatgcttggagtacagccgattgaaccggggtatgccgtgttccgggtgcgtcctcaattgggtgatgcacatgaagcaaggggagtcgttccaactcctagtggcagcattcgcgtgtgctgtgttcgcgaggaagggcatgtatcggtcgatcttgacatgccgtccggaatggttgcgcggattgagaatgagcaaggcgatgtgattgaaatgaggtccgtatgaggcgcgtcgcttgctgcaagcactagatggctgaacctatgcggagtggatattgcgatgctgtagagcaacatgcccaaaagaaacaatcatttataatcatatataatcattaatggtcagtacgtgatggtgctgcataacgtggtatggctgtttgattgttcgaaggagaatatacatgatcgccaatccatatgaagagcatatcgaaccgtttaatgcgcaggtggcccgtaatccattgaggaccaaggctcagtgcgagcatgccttggtggaactgctgactcctgcggtgcagctggcgatgaggggtgggcggtatggtcgcttccgcatgagcgacagcggtgccgtatacagtcaggatcgtacgtccatagaagggtttgcccgcttgctatggggtctggggccgctgttccacaacagaagcaatattcgtcgtttcggccagtggtggcagtggacgaccgaaagcctggtcaattgcactgatccctcccaccctgattactggggtggggatttgactgattatgatcagatctttgtggaaatgggagccatctccgcctttctctatgagaccaagacggaattctgggatcatatcaccgatgagcagcagcagaatattctgcgctggatggatcaggttaaccataaagtgcttcccaagaccaactggctgctcttccgcacgctcgtcaacagctggttcgtcgacaccggtcatccggaatacgccaagctcgtccaggacgatttcgatatcacaaattcccattacctcgggcacggatggtcatatgacggctatgaaaaccagatcgacaactatatccccttcgcctaccaattcttcaccctggtactggtcggtctgaccaaaaggaacggtccgcaggaacagctgctcaaaaagcgggcgtccgaattcgtgcctagctatgcaaattggttcgcaaccaccggcgaatgcttgccttacgggcgaagcctcgactaccgctttgcgcaggccgcgttttgggccgcagcctcgtttgccggcgtagagcctcctgaacactacagcatcgccgatttcaagcatctgctgctgagtaatctgcgttggtggttctcccagaacatcttccagtcggatggcctaattcctatcggatacgcctaccccaacatgaacatggccgaaggctacaacgggccggcgtccgcgtattgggcgctcaagacgttcattttcctgtgcatcgatgacgatgatcccttctggacagtgcgagaatccgagcaaatcgccttcgcgccgctgaagaagcagccggaaccgcgtatgttggtggcgcacagcagcaccggacgagaagtgcaggcatttactgcggggcagcacagccatgagcatgcccatgccaacgccaaatatgagaaatacgtgtattccaccactttcggtttctcggtgcccaaagcggcggtactgctcaaacagggtgcctacgacagcacacttgccatatccgaaagcgagcactactggcagaccgcctacggttatgccgactgggccatccacgacgactacgtgtacagcgaatggaagccgttcgacgatgtgaccattacgaatttcgtggtgccgcatatgccatggcatgtgcgtgtccacagaatcgacaccgcgcgtcgcctgcatctggctgaaggtggtttctccctgccggatggtgggcaggaaatcgccgccggaatcgataacgcggtcttctaccgcactcaggaaggaatagtcggtctggtcggtgcgcaggggttcgatgtggagctttcggttcctgagccgaacgtcaacctgctgtatcccaagacgcgtattccgttgcagacccgtgtaatcgacctcggtatctataccttcgtgtcgctatacctcggcgacgccgaaggcgaatcaatcagctcggacggcactatcaccatccccgaagtccgtctgcaagacaacgtactgcatgtaggcgatgctgacgtcgttctgcaggaatacggcgaataatcgcgaatagtttggtgtatgtatcgctctggctgcattgcggcagtcggagcggatcgtagaaaggaaaatcatggctcagcccgtcaactcttatcgatatgagtattggacccgtaccagcggtgatctgaaggatcgccgcaccccgatcgatgttccgcacatcgtttcgaccccaggggacgccgtcaaggtcgtcgttgaccccacacaggaatatcagatgtgggaaggcgccggagcggctattacggattcctcggcatcgctgttcatgaactcaatgactagcgaacagcgtcacgcgattcttacggagatgttcgaccccgagcaaggtggcttctcctccgtgcgtatgtcgataggcgcatgcgacttctccagccagaaatactacacctatgacgatttgccggatggtgttgccgctgacgccgctttggaacacttctccataggaacaggggagccaggggctccggatgctacccgagacatgaagaatgttgtgccggtgcttcaggaaatcgtatcgattaatccggccgtcaagattatggcctccccatggagtgctccggcctggatgaagacattcaaccgcatcgacggttcggggcgcttgcgcattggagaatacgtcggcaatggctatcgttaccaagacaccattgactatgtgtatgcccagtatttcgtcaaattcatcgaggcgtacgccaagctcgggattcacatcacttctgtgacgatgcaaaacgagccgtccaacggctgcccctggccgattaccgtctggactccggaggagttgactaagtggggaagcgaatacctgcgtcccgcgcttgacagggccttccctgatgttgaaatctatttcggagacgactcattgcgcttctggcagcgcccggtcagcgaatacatgacgccggcacaggcacagtgctttgcgggagcggccttccatacatattccggtcttccaacttgggtgcataatggaacacgccaattcccccagtggaagagtgcgatgacggaacgtcgatgcatgcttgatgaaactgtcgacgaggccagccatgtgatgttcggcgaaatcggcaattggctggttcgtaatggcgtggggctgatcaacctgtggaacatagcacttgacgagcagggattcccgagctatgcaggcacgtccgggcgtcgtggagtcatcaccatcgactcgagcaccggcaaggtcaaacgaaacctcgagtacttcatgctgcgcaattatggacaggatgtgccgatcggttcacggcgtattggctcgtccaattacacgccggatggtcgcaatggcggtctaggatcggtggcattcgagagcaaacgcggcgacctgagcgtgatcgtgtacaatcctggcggcacggatgtcgaagcggccatcaccattaacggtgagggggcgcgctggcagaaagtcgttgtgccggcatatggaacagttaccttccataagtctgatcgagagatgaatgtctcaactgttcctgaggatgatgaattcaagatcacctatacccctcatccggctgatgaccatgatgagacgctgttctaacggcttggaattctggaaggttgctcttatgtgggacttggtttcgtccgggttccgtatttcttttgcacgatttcgctcataaaagataattgcgtaaatgcaaataatggcaaacagccttattgatcagaaacgaacaatatatttaacaatcacatagatacatacagtgatgtatggactattggacaatgatgctgagagaaaggcacgtcaatgaagttgacacgtggcatgaaagtaattgctatggcttctgtgatcggcacgctgcttgccggttgcggtagtggcagcaacgattccagctcaagtgaggcgctggatgaaaacgccaagacggaaatcacgctggcaggctggtctcttgattctcgtccggaattctcttaccttgctaaggcattcgagaagaagcacccaaacatcaccgtcaaggtcaaggaatactcggccgacgactacgacaagcagatgaccggcgatatctccgccggttcccaaccagatgtattccctatcaagaacctgcagaagtactacacgtatgcgcagtccggtggcctggctgatctcgctgacatcgccaagacctataagagcgacaagaacatcgatatttccagctatgaccttgacggcaagtactacgctctgccataccgccaggactcctgggtgctcttctacaacaagacgatgttcgagaaggcgggcgtggacctgcctgacggcacctggacctgggacgattacaccaaggtcgccgaggagctcaagaagaaactgccggccgcgggctacgacgccaacgcggtctacccgatgtaccagcacaactggcgttcggtggtccagtcctttgctctggcacagaccggataccagcctgacaagacgttcttcaagggcaacttcaactatatgaagtcctactacaagcgcgcactgcagtggcagaatgagggcctgaccattgactggaacacctccaagaccacttccgtgcagtatcaggctcagttcggcaccgaaaaggccgcgatggtaccgatgggtacttggtatgcgctggacatcgtcaacgatcagaagagcggtgacgccgacaagttcgaatggggcatggctcctattccgcagaacccggatgccaaaaagtccgacaaggccgttaccttcggcgacccgaccggtttcgcggtctcttccaaggctaccggacagaagcttgctgcagccaaggaattcgtgaagttctgctctggcgaagagggcgctaaggtgctcgccgccgtggccatcactccggcctatctttccgacgcagtgaagaacaccttcttctccgtggacggcatggccgtcgatgacctgtccaagaaggcctggcaggataatgaaaccaagcctgagaacccggtcggtgagggtggagacaccatcggctcgctgcttgatgatgcacactcctcgatcatgaccaagaccaagtccgttgaccaggcattggccgacgctaagcagaacgccatcgatcaaggagcgatcaccgagtaatcattgccgtatcgattactggtgatgaaaggagcgtcctagattccctgcatgttgtgcaccgcaacgttattgctcccacgataagtgggtgtgacacatgcggctagggcgctcccactatatatacattgttgttttccttgtaaaaaggagaggaaggtcatgtcgcagtcggtatcactcgatgcacctacgaacgcatcaggcaaggcaggcaagccggtcaccaaaggtgagttggccgaaaaggccatttcccgtcgtaatttcatccatggcattggattcatagcccccaatttcatcggcttcattatcttgacgctgattcctgtactggcgctgttctacatcgccaacaccaagtggagcgcattcggcgacccggtcttcaacggattgacgaactggaagcgactgctgcatgacagtgtgttcaaggatgcattcgtcaatacgattgtctacgcagtggtgcatatcccgctgacggtcgctatcgccttcggactagcgattctgcttaattccaagctcaagggacgcgccttcttccgtacggttgctttcttcccctatatcacctccattgtggctgtagcccaggtgtggaacatgctgttcgacgccaagtccggtgtcatcaaccagttcctcggactgttcaccagccatacccccggctggctcggatcgacgcattgggccatggtcgcagtgatcatcgtggcgacttggcgtgaggcgggctacttcatgattctgctgctcgccggtctgcagacgatccctgccgagctgtatgaggcggcgagccttgacggtgcgaatgcgtggcagcgtttctggaaggtcacggtgccgtgcatgcgtcctacgctgttcttcgtgctggtgacgttgaccatcggctcgttcaagatcctcgacctgaccttggtgatgaccaacggcggccctggaacctccacgctggtgcttgcgcagtacgtctaccgtgtcgccttcgatcgtggtgatttcggttatgcgagcacggtctccctggtgctgttcgcgctgtgcatggtcgtgaccctgatccagttctggtacaacaacaagaaggagaagtaagatgagttcccaagttgttgctcccgttcccactgctgcggaaattccgtggaacaagaagaagatgccgccgctgaagatcgcgggtattgttctcggctatgtgctgatgatcggcgtcgcggcgtttgtgctgttgccgttcgtctggatggtgctggcatcgcttaagccgaacaatgaggtgttcctggtcccggtgaagtggttccccagcgtctggcattgggataactacatcaagatctggaccgattccaacatgctgacatggttgggcaacaccgtgttcttcgcgatttgcgtgaccttcctgcaggtgttcaccggttcgttcgcggcatatggcttctcgaagattcgcttccgcggccgcaatgtgctgttcctcatctacatcgccaccatggcagtgccgtggcaggcctacatgattccgcagtacaagatgctctccgcagtgcatctgaccgatacacgttggtccatcatcctattgcaggccttcggtgctttcggcgtgttcatgatgaagcagttctacgacacgattcctgaagagttgtctgaagcagctcgcctcgacggtttgtccgaattcggcatttacttgagaatcatgctgccgttgtcgggtccgtcgattgcggcattgggcatcatcaccttcaccaatacatggaacgacttcatgggtccgttgatgtacttgcgttctccggaactgtggaccattcagcttggtctgaagaccttcatctcgcagaactccgcgaactacgccatgatcatgacaggttcggtcatgtcggtcatcccgattctgatcgtcttccttatcgggcagaagcagttcatcgagggtatcgcaacgtccggtatgaagggctgatagcttggtgaattgcagaaagggcaggagccactgcataactgtggctcctgccctgctgtattacatggtgaaatctatttagcgctcacggttggtgtggcggctatatgcaatgaccagaggaatggagtccgatatgaaatcagaaaattttaatcgcacatattcgacaatagtgaataccttgatagtaatcatcgaggcgagcttatgcttgattgtcggtgctctgcctttggtagtggtcgcattcgccgtcaacaacttcgactattgggcgctgtacattgtggccgcggccctcagcatgccagggatggcggcgctgttcgcgatattccgcgatcagcccacattgctgtccatgaatgcttccatgcgtacccaggtatggctggacaatgaatctgatcctgatttccctccggaatggattgcggcgccatacgtatatccggatgcttcggtgctgtttatcaagtcttatttcaaagcttatgcacgtcttttcaaacggagtctgggcatcggagtgttttactggttcctggtgttctgcttcggatacgacatactcatcgttctgcagctgagcgggggagggtttgtcgtcccgatgctggtgatctgcatattgatggcattgcagtccatgatggtttcactcgtgctggctgtagaatatcctaaggccaagtatgtgcagctactgaagaacggtttcctcctatccgtgcgccgtatccctgtgctgttgctcactttggttgcgctggtcggttatgcgtgggcgctgttcacatggactattcccgtgctggtattcgcctctggcatcgccgcctacgtggtatgggcttgtgctaattggcaggcaagtgtgttgttctcgtccatggcaatggagagcggcgacaagcgcattatcgacatgtaccatgcgacgcgtaacagcgccgcgtcgaagagttcttggttcagaggcaccaaggattacatctcctgacgctccccaacatcatatttcaccaacgattgcaacgaggcaatattatgagcaataacgaattcaacgccgatcactctgttgatatccacctgacgcaggaggccgtgcataatgccgccaagagcgttcatggccttacctataagggattcggcgtgctgtcgggcaacgccacgtcaagtcttcttatggattacaaagcggatcatcccaaagtgtactggaaattgatcgagacactgttcggcggtcgacgtccgatgatgaataccgtcaaggtcgaaatgggcaatgaccgcaacaactccacagggcccgatccagcgaccatgcggacacatgatgaatatccggttgtagcgcgtgagccgggcttccagcttgccgccgatgcaagtctgtacaaccctggcattcatctgagcatattgcgctggtccgcccctacatgggtgcataccaacgatgatgtctaccactggtataagaacacgattctggcggtatatcgccgatacggcattatggccgattcggtgaatcccgatgtcaacgaacgtaccgcggatatggattggatcgccgaattcgccaagcaggtgcgtaccgacgacgttggatttgaaggcaatggtcccgatgatgttaacagagggtggatttcggatgaggagcgcagactgttccgccaaatcagggttatcacttctgatgaagagtgtacaggaacttttgccggtgacgtgctggctgcccctgagtatctcaaggccatggacatcgctgcataccactattccgtcgaggacgaccagaacggcaatttcacgcgtcttgccgacgaatacgataaagagatttggaactctgaagcccaggcggtgttctccaactcggccgatcgtcccaacaacaccaacggcgatggactcaaagccacggaacgtgccgatgcattcgatcatgccaatgggaatgagcgcttcggcgaatatgtgagtacaggcatcggcgggcaaaacggcccattggaaatggcgaataccctgatcaaggggttcgtgtgctccaggcgaacccatgccatataccagccggccataggcgcgtgctacgagcatatggagtacgcggccaaagagctgatctcggccagagacccgtggagcgggtggctgtattacgatgtaggctgcgcggtactggagcattttgccaaatacgccgaactgggatgggaggaagaaggcgaagaaccgcatatctggcgtgccatccccgatgcgtccgcatgcagggtcggcggtaacaatcctgttaatggtgcccgccacggagagcccagttatctgacgctggccgctccagatggcagcgatttcagcacggtgatcgtcaacgattcggcatttgaaaagagctaccgcatcaccgtggacaagaatcttgccgcttcgtcaaagcagcttgaaatctggcagacgatagcggcgcgcccaggcgaggcatatgacgcgtcatggcgccgtcatgtgggaagcgtcgcagcggagaacggaacattcaccgtcaccgtgctcccatggtcgatggtcacggccaccacccttgccgacgtcgagccatacgccataccgtcaactgcggaaggaacccgtgcggtgctcgatgctgacgcaagtcgcggactgctgtacgccgacgacttcgcctatgagcagttcgagccggtcgaagtcgtgcatgcccaacaccgcgcgacggaggagtatctgcaatcgcgtggcggtgatgccggcgcaagcgcacggtacaccaccgatagcaacggcgcatttgaaatcgtgccggatgatgaacgtggtcatgtactgcgccagcagatcagcgcgacccaggcgggcaacacttggattgaaggcgatccgcgcaccgcaatcggcgatatgcgttggaccaattaccgagtctcggtcgatgtgaaattcgaggactatgcaggccgtgcaccatacgtgctgttgggcgcccgcgagatgggcggcgacaagttcaccaccgacatctgcggctatgatgtcaagctgcgcgcggatggcctatggctgttacggcggtacggtgacgaaaaaagacgcggccatttcgaggaccttaggcaatccgcattgcgtgcaggcaaaccggtatttcctcgtgaaagtggacaatggttcacgttgtctcttgaagtatcgggagcatgcgtcagcatgtgggtcaacggggccttggtaacaagctggatcgatgatcgcccacagtcagccggccgtatcaatctgggcagcagcttcgatcatgtgcgtttctccaatttgcgtgttgaacgcatcgatggtttcagcccctactacacagcgcttatcgacgacatgcatatggtgagttgggacgactcacgttcgccaattatccgctatgacggcaattggcttcaccgcaatggccagggcatgttcacctatatgcgttccatctcaacgacaaacgatccgggatcctcactaacgcatacgttcataggcacaggacttgacgtattcgggccatcagatggcactgtgcgtgtgaatgcgattgttgacggcatactattcgccgagaacatgccgacgatgcccaatgagggatcattacggacgcagttgagagtcgaggggctgccaagaggcaggcatacgattacactgcaactggccagccatgcaacatggtcggttgatgccatcggaacgttgtcataattcataacagcataaacgtgattgacagaagatatggcagcgaggaatcagcaagaatcacaatccatccggtctgataaatcagataggccagataagcccagcagggtgcatccgaagaccatctcgatatggtcggcattggggttcggggcaggtgatttcttcggaggcggccaacttgcattggtgaccacctatctggctttgttctggacgcgtttttgcggaatgaacattagcgtcgcgcagggaatcatcggcaccagcgccataatcagcgcagtgtccgcactgctgttcggagtcctcggcgacaatctgtatcggtaccgcatcgggcgcagattcggccggcgtcatttcatgctgatgatcatcgctccttcgctgtttatcggcatactgctatggattcccggttcttcggtgtggctatatgcgtgtgtgtatgtgctgtgggtgatgctggctcaggcattccaagcctgttacaacccgttggccggcgagatgacgaaggacttcagccagcgaacgaaattgtcgaccacacgaatgttcatttccacagccgcagccacattcatcccactcgccggaagctgggcgttgtcaatgtttggcgagaccaaggcaaccgcctatatggtggtgggcatcatctcgacggtgctgttcgcctgcgccgtagcggtcacatggaagaccacatgggagatgacacccgagcaggccggcttcggcgaatacgccaacagtacggtgcatgagacatgtcttgggctgcgtgggtggattcgccgggcggcacatgtgatacgcgagtacgccacgacattgcgtattcgcgaattccgcaagcatctggtgatctttctcctagtacagacatcatccgatgtgttcgggcagaccttcctgttcttcgttctgtacgactggagcaaaaccgctgcttttgcctcgctgttgctgggctgcacggttgtttcgttgccattgatgccgttgttcggcaaggcagtggtgaagttcggggtgcgccggctctatgccttcgcttttgcgggcatgctgcttggtgtggcatggctggccttggcatgggtgttgaccggtgctctgcctagtgctgtgtggatggtgctcgcagttgccgcatcgctatggtttttcgtgttcaaggcgcttgtggggtatttgccatggacggtattggtattcatgccggatatcgatcagattgttacgcgtaggtaccgttcggctactttttccagtgtacaatcaagcctccgccagctcggctcgggaatcgtcaccattggtgtcggcctggtccttgccatggtagggttcgattcctcactgccacggcagtctcgagaggcgtcgatcggcattgccgcggtcatgctgggcttttacaccgttgcgatgattgtatgctggattgtctcatcgcgccttgccatcaatcagcggaccgattttgacgtgctgcatgaggtcgatcgactgcgggctgggggagacaagacagaggttgatgcatccgttcggcgtaccgtggaacggcttaccggactttcctatgaggaatgttggaaatagcaaataagaaacaacaaagccgatgcataaacgcatcggctttgttgtttctatcggctccctatcaggactgctgttcctccgggcgaccgggctctgcccacaacttatggaacacgccaggcatatccactcggccgtaagtgtgtgctccgaagaagtcgcgctgtgcctgcgtcaaagcagttggcagacgcttcgaacgcaagccatcgtaataggtcagagagctggagaacacaggtgtcggaatacctgcatcaatggcggccttgatgactcggcgccaggaatcctgggcatcggcaaggaacttggcgaaatacggatcaagtgccaaggcagccgggtgcccattggtgtaggcgtcggtgatgcggttgaggaatttcgctcggataatgcagccgccgcgccagatcttggcaacggctcccaagtcgatatcccagccgtactgcttggcaccgtcttcgatctcattaagtccttgagaataggcgatgatcttggaagcgagcagtgcacgacgcacatcctcgatgaaggccgcctgatcttccgttgcaatggccttgttagggccagcaggcgtattctcctgtgctgcctgcctcaattccgggtggcttgacagtgcgcgtgcgaacacggcctcgccgatgccggtaacgggcgagccgaactccaacgcagtctgcacagtccatgtgccagtgcccttcatacctgcctggtcgacgaccacgtcgaccagcggcttgccggtacgttcatccttctcatgaaggatatcggcggtgatttcgatgaggtaggaatcaagatcgcccttattccaatcggcaaacacgtcgccgattgcttcggggaagagccctaggccacggcgcagaatgtcataggcttcgccgataacctgcatgtcggcgtactcgatgccgttgtgtaccattttgacgaaatgaccggcgccatcggtaccgatatgcgtggcgcaaggctcgccatcgaccttagcggcgatggattccagaatcggtccaagcgtcttccatgattccgcggtgcctcctggcatcagggacgggccgttcaaggcgccttcctcgccgccggacacaccgcagccgacaaagtggaatccggcagcacggacttccttttcacgcttgatggtgtctttgaaataggagtttccgccatcgacaatgatatcgccaggctcgaaaacctcctcaagctgcttaatcacggcatcggtgggggcaccggccttgaccatgatgatggcggtgcgcggacgctgcagggaagcggcgaattcctccatggtcttggcggggacgaaaatgccttcgatgccatgctccgcgatcagcttttccgtgcgggagtagtgacgattgaacagtgccacggtattgccatggtgggcaaggttgcgagccagattgctgcccattgcagcgagaccgataacgccgatgttggcttgtgctgtcatggattgtatccctttgcttttggtattaatgaacgtcgaatatggattgagcctatttcgctagcttcagtcggtgcaatgcttcttggcatagcacttccggagtttggttggataccagtcgtatgccatgctcatcggactgaagaggctcaagggtgtcaagctgcgattgcagaagcgtgacgggcatgaaatgctcgcgttgctccatacgctcggcgatatcgtccttgtcaaggtcgagctccacaaagactacttgtgcatcggcttcgcgcaatatgtcacgatatgcgcgcttcaatgcggagcaggtgacaatggtgctggaccctttgcctgcctgctcggtgatccaatcgcgtaggctgcgcagccaaggccagcgatcctcgtctgtcagtggatggccggaggccattttctcgatattggcttgtggatggaaatcatcggcttcggcatacggccaccccaatttgcgtacgagctcctcagccaaggtcgttttgccggtgcccgttacgcccataacaaccaggctgacgggtttgacattggaatcaagcatggattctccttgaatggaaagggcgaccagactcgaatacgttccggtcgcccgatgaaaaccgatggctcaatcaccactcgtgcatggtgccgtcaagcagacggtcaacgggcagcggagccggctggtacggatacttggcagccagcttctcgtcgaagtcgacgcccaggccaggctggttgcccgggtgcaggtatccatccttgaacgtgtacgaggtgtggaacacctcaagggtctcatccgaatgcttcatgtactcctgaatgccgaagttcggaatcgccagatcaagatgcaggttcgcggccatgccgaccggagagacatcggtcggaccatggaagccggacttgacgccgaacagctcggcgaaggccatgagcttcttcatgtgggtcagaccaccggtgtgggtgacggcggagcgcacgtaatcgatgagctgttccttgatcagggtgatgtaatcggtccaggagttgatgatttcgccgatggcgatcggtgtggtggtgtgttgacggacaacgcgcaggaattcctggttctcctcggccggggtggaatcttccatccagaacaggtcatacggttcaagcagcttgccgaagcgtgcagcctgaatcgggctcagacggtggtgggaatcatgcagcaggataagatccttgccgtacttgttacgaacctcttcgaagactcccggcagcgtgttgaggtacgtgcgggcatcccagacctcctcgacaggcaccgtggtacgacgtgcaggttcatagtcgtagcgcagacccttctcgccggcgccctgctgtgcattggccgagccggcaacaccataggttgacggaatgccaggcagcgcgaactggatacgggtggccttgaagcccatatcacggtacatgtcaatggaatcgaacaggctcgggaagtccacaccagaggcgtgggcatacgtcagaatgccggtacgggaggcgccgcccagcagctcatagaccggaacgcctgccttcttggctttgatgtcccacagagccacatccacggcggagatggcggccatggtcaccggaccacgcttccagtacgcgcccttgtacaggtactgccaaatatcttcgatgttgtcctcgttcttgccgataaggctcggtgcaatggtctcgagatatttcgcggcaacaagttcgcgtccgttcagggtggcgtcaccaagtccaacgacgccgtcggtggtggtgatgcgaaagacgacgaagttgcgtcccgggcttgtcacgaagacttcagctttttcgattgccatggtgcattcctttctcttatggcgcggcacgttccgcgccatagtccccacctgcggcgaggaagtttgtgtttttgattatttatgtgtatgatcatgcggccgtcgtcgaagacagctcatgaacaagctcgtttaccttgttggtgaagacggtgttggcaccaagatccttgtccaaataggacaccgccgaagtgacgtcgccgctgttggcaagcttcttcacctcatcgaggttcacatccttggcctgtgtatcgccgaacctgcgcaggaatacgatccatgcggcgatggctcgtgcaggagccgtaatttcgcgtccttcggcgagcgcatgcttggcgacggggacgatgcgtaccggtagtttttgcgaaccatcggtggcgatttggaagaggtggtggtggatgcgtgggttggagaagcgttctaacagtttggctcgatagtcgtcgctggacacggataggtacgatccggcaagatcccaccattcgttcacccatgattgcagtttgggatcggcgatggcttcggctactgattcgtggccgaatagcggtccgatgtaggcgagtgtggaatgcgagccgttaagcatccagagtttgcgctgctcgtagggctctacgtcatctgtgatgacggctccggcttcatcccatgcggggcgtcccttggggaagtctccttggatgacccattcgaggaagggttctgtgcgtacgggggctgcgtcgtaccatcctttggtttccgccacggtttgtagttcggcgtcggtggtggccggcgtgatgcggtcgaccatggatgtggcccatgccacgttgtcgcaggtccattccagcagggtgggatccacggcttcgatggcttgttcgactacgcggcggaatgcggctccgttgcctgcgagattgtcgcaggggaggatggtgattgcgccggcgcctgctgcgcgtcgcgcttccagaccggctacgatgcgggcgggtacggtggatagttcggatgcgttcacgtcgttgcggagtttggcgaggtcttctgatacgtcggtgtcgtgaacgttgagattgccgtgggcgtctcttttgtatccggcttcggtgactgtggacgtgacgatggagacgttcgggtcgacgaagtacttgcgcagcgcctccatgtctccaccttcatgcatggacgagatcgaggagatggcttcgaacgaatcgccttccggtgcggaggtgatcagcgtgtagacgttgccttgcgggtcaagtttgtcgaccattcgacgggagcggccggtgaatccggcaatgccccactgggctgcgtccggtgcgtgttccgtataccaggcttgatgggcgcgggtgaagttgccgatgcccaagtggatgatgcggatcggcgcggcgctgcgtccgtgctctgcgcgggtcagcctcggcaatgatgtgggatctggtgcggtggtcatgaaaactccttggaggatggatggttgttgcggttttcagagtttgaatacgtctgatggttgcccgtccacggaacggatgacgatttgttcgccttcctcgtagctcaatctgtggtcggcgaccaggccggaaacatagcgtgcggtcaggcggcggttcatgtcgtggcgggctgggatggagcagagtgcgcgggtgtcgtcgatgaagcccgaaagcttggagaatcctgcatagggtacgacatccgcgtaatagcgcagaatcgattccggtgcgtccaggaaccaccagggtgcgccgatgtacagtgccggataatatgccgccatcggagcaagctcgcgagaatatgcggtctcgtccatggtgaacgccacaagatggaaatcgggattgtccccgtattcgttgagtacagggcgaagccaatgcgaccagtcggcgggcatcgggcagtcggctccgcaatccgggccataattgacgagttgcctacggtagtggttgcgcatcacgccgggatgcatggtcatcaccaggccgtcatcctgtgcgagtttggcctggtcgttgagcagatgggcgtgcagtcgatgtgcctcgtctggggtcagggcgttgcgacgtgccttgtcgtacaggcggattgccccatcatccgacagtcgggtggtgtctccggaccagtcgccctcacgtgaagaatccacgccatgatccgagacgaccgcgccatgctgtttgaagaacaggcgacggcgacgcatggcttctacgaacccctcataggtggaggtgtccacgccggccgattcgcctagcgcatcggacagctgaacccagtccacacggtcgacctcaagataacggtccgggcggaagcagggagcgaagcgcgacgggaacgtgctgtcggcgcgaacctggtcgtgaagagccaaatcgtcggtggggtcatcggtggtggagatgaaaccaatgttgaaacgcttgacgagtttgcgcgtggtgaagtcgtcggatgttagaagttcgttgagctcatcgtagatgctgtcggcggtgtcctcattgaggggcttgtcaataccgaatacgttggatagcgaatcctcgaaccaatagcgcattggcgtgcctgcataggcataccagtactttcccagcaagcggaaggcattgcgcgactgctcgtcggtgaaatgcttctgtcccactcccaaatcgctgaacggaacaccgtgcccgtgcatgatacgagtcacataatgatccggtgtgataaacaggtctgtgggattcttgaaatgcttatcctgagcgaaccagtcgatgggcacatgaccgtgcggagagatgatggggcggtccttaatcgcctcgtacagtcgtcgtgcggtggatcgttgactcggatctgcggggagcaggcgatcttcattgagcgcggatgtcatagtaattactcctggaactaatagctttgtttacaagtgctgaataatggcttgtgccaattcccgatattgcgatgcgtcaagatacacgcggtcgggattcatcgcgaacaccgtcttccactcgaatccgttccggtatttggggcagaggtggaaatgcagatgatgcccatcatcgccataggcgccgtagttgatcttgtcaggatggaaggcctcgtgcaatgcctttgccacgtgattcacgtcatcgagaaacgcggcccgttcctcgtcgggcaaatctacgatttcggaaacgtgatgcttcgaagtgacgatgacgcgacccctatggctttgttccttaaacagcacgagcttcgaagctggcaattcggcgattgcaatgccgaatgcgtctaaaagctcgccccccatcgcagtaggcgcaaggttctttttctgtctgcggcatacctcatcctttacgaataatgtgacgttgcggttgttggccacattgccggtgtgcgtcatgtttgcaaattcgatttcaatatatacttgggcttgaaaaggtgtgatattttgcatttatttgttttgaatggctcgatgcattgcaaatcggtgaggtatctgttagaaaaatggggaaggagaaaccgtgagcagtgaatctgccgcgcgatgccatgccagtttgagcgacgtatcccaggccgcgcatatatccatagccactgcgtcgcgcgctttcgtacatcccgagcgggttaatgccgataccctgaagcgaatatacgatgccgcggaaaaagtcggatatgtcccgcgcaagaatgctcagcagtcgaatgatgattccggtaaattgatcgccgtggtcatcaacgacatcggcaatccggtgtacgcggaattcgtcaaaagcattcagcatcgctgcagggaatacgggtattcgattatgatcatcgattctcaggagatgagttcgatcgaacacatcatgctgatgctgaccgaagaatacgtagacggaatcgtgcttgcatcatcgcgtctgtccgacgcgaatattcaaaaaatggcgaaggcgaaacccttggtgctgattaatcggtcggttcacggtgtcaaatcggtgatcgcggatacctatggcggtttggagaagttcctccaagaattatgccccttagggcataaatcgttgacctatctatcagggcctgcggattcatggcagaatgcggtcaggcgagaaacactgtccggcatctgcaagaaaaaaggcattgcgctgaatgtcataccaggttcctctcccacttacggcggcggggtatcctgcgtggcccagttcttccagcaccccacctccgcggtgatcgcctataacgacatcatggccatcggattcatgaccgctatgaaggattgcggcatcaaagtcccagaaaaggtgtctgttgggggaattgatgacatccccatcagcgcaatcgtcagtccggcattatcaacggttcgcatagatcgtaccttaatcggaaaaaccgctacggatgaattaatcggccaattgcgtggagggaacctccgccgatccctgaagccgattatgattggctcccatttcgttatgcgcggtagtgtgggggctgccggcgattgacatacgccatgcgtttacctggtagggatgccggtggcgctatgctgcatcggtattgatcaagcttcgtgacgatgtccttcaggttccagatcgatggttggggttatgcatggcgaacggggcgtgtctggatgaaatgtcctagtggtccgagccgggaatgctaacgctattgcgttctatgaactgtgtaggtactttcaaagaagtatgggcatccgcattgtcgttattgaatagcatggctaccgcggctttgctttctttgcggcggtcgatgcgtatgctgctgagcgtcggagagagcagggtacagtcggcgatgtcgtcgatgcctataatcgagaaacgttgaggcacgtctatctgttgttgctgtgccgcagcgataaatcccatcgcctgcagatcgttgtaggcgatgatggaagtggaatccggctgttgcatgaattgcgagaatgctttccgaccggcctcgaaagtcggctccttgcagggaaggcgcttcagtgacatgttcttttccttgcatacatcggacagggtgcgccaacgcataccttccgcccaagaagcctctgggccggtaagatacgtgacaccggtatgaccaagtgcgatgagacgtgctaccgccgattcgaaccctggcctgtaatcaggaatcacggacggtaggccgcgtaccatacggttgatcatgactactttatgatgccgggcgaatttacgaatcatggtatcgctgagtcgagaagaggccagcagcacgccatctacattattgagatcgtggagactgtcacgctcgttcattttggtttcttccgtgtcggcaataagaagcccggagttttgtcgcatgcattcatgctgggtattgcggataagctgggcgaaggcgggattgctgatatcggaaacggcgagcaaaataagacgatgtttgggcttcccgaccgtgagtggcgtgatggtaccggaacgatatcccagtcggttcgctgtgtcgaagatttgctgcgccgtggcttcgctgacatggcctggacgagagaatgcccttgagacggtggagggcgatacacctgctgcgcgtgctacatcaacgattccgggatatgctctgtgtctagacatctcttgcgccaccggtgtgtgggaattttctttgcagtatatgttatacgttcccctggtgacggattgcaatatatatgggatgtgcaatgagtgtcggcagtttgggaatcctgcgaaccaccgacgctgaggggcgcgtggccgtcggtggtctggggactgctcaatctaccgacacttacatcccttctatcgtcggcagattggggactgctcaatctaccgacggtgagaagtatgtaagcgtcggcagattgagcagtgggcttggcaacccgcttgaaaccgaatcagaacagtcctggctcgttcaatgcggaatgcttgcggctgtacacgaaatacacgatcaaaccaagggcgaaccagattgcgaaacgcacccaggtctcccaattcaaaccgcaaatcagaatgaagcagaaaatgatcgcgcagattggcgtgaacggcacgcccggagcgcggaagccacggtgtgcgtccggctgggtcttacgcatccacagaatgcccgcggacacgatgatgaacgccgacagcgtaccgatgttcaccaattcgaacagtacgttgatgttgatgaaaccgccggcgatggccgttagaataccgaagaaccatgtacctttgaacggggtgcgatacttcgggtgcacttcgccgaagaacttcgggaacaggccgtcgcggctcatggcatagcagatgcgggactggccgtacagctgcaccagcatcactgtggtcatgccgatcagagcgccaagattgacaatgaacgccagccagttgaggccggtttcgagaatcacgccggctaccggagcgtcgatgaacttcgcgaactccttgtatggcaccacaccggtcatgataagcgtcatgatgatgtacagcacagtcgacacggccaacgaaatgagaataccgcgcggcagcgtcttgttcgggttgacggtctcctcggcggaggaggagacggcgtcgaagccgatgaagctgaagaacacgatcgacgcggccggcacgatgccgtacggctgggtggagccgggctggaacgtgtagatgccatacggggagaacggctgccagttggacggcttgacataccacacggcgcacgcgatgaacagcacgatgatggcaagcttgataagcaccatcacgtcattggtgcgcttggtctggttgatgccgatggacagcacccacgtgataatcagcacgatgacgaagccgggcaggttgaagtaggtggtgacgcccggcgtggtgccgtaggcggcggtcagttcgaccggcaaatgcaggccgaagccttccagcagcttgttgaagtagcccgaccagccggcggacacggtggccgcctgcagggcgtactccagaatcaggtcccagccgatgacgaaggcgatgagctcgccgaacgccagataggcataggagtaggccgagccggaaaccggcgccatggcggcgaactcggcgtagcacaggccggcaaagccgcagcagacggcggccagcaggaacgatacggacaaggccgggccggcggtcagcgcgcccttaccggtgagcacgaagataccagtgccgatgatcgcgccgatgccgagcatcgtcagatcgaaggtgcgcatcgtgcgcttcaggggagtggattcggcgacaagctgatccacgcttttcttacgaaacagatccatgttcttctctcatgaaatctaggactatggggctgaaccggacggatttccgggatcccggcacgcctcaacgccgggaatcaaaggcggtttcttatacaaaaccgcatatcgatcattagtgtacgactgccacgcgaaaacagacgatttcgccaatacgtcacattcctgcgcaacaataggtgcctatgagcatgaacgcagcacctgaaatcgcattctcgtccgagcagggcaaggccaactatgcggccgcccgccgccaataccccgcacaggccatcgtgaacctcaaaaccatgcgtgacaacatggcccatttggtctccgtggtcggcggtccgaactccggcaccgcggtgatgggcgtggtcaaggccgatgcctacggccacggcctgctgccttctgcgctggcagcgctcgccggcggtgccacctggctcggcactgcgcaatcgcacgaagctctgctgttacgcaaactcggcatcggccccgaccgctgccatattctgacctgggtttacaacggcaccgaagtcccgtttgacgagctgattgctgccgacatcgacgtgtccgtcggctccctgccgggtatcgatgccgtggccgccgccgcgcgcaaactcggcaagcccgctcgcgtgcacgttaaggtcgattccggctttggccgcaacggcttcacgcctgcagggttcgccgccgcgcttgccgagctggtgccacttgccaaggaaggcgtgttgcatatcgtcggccagtggagtcaccttgccgtggccgattcgcctgacgtgcctgagttcgtggcctccaccgaccgccagatcgaaacgtttaaggacttcaccgcacgtatggaaaaggccggaattccgccggagattcgtcatctggccaacactgcggccactctggatcgcccggaaattcatttcgagctcacccgccccggcatcgggctatacggctacgagcctgatccggccatgggcaccccgcgcgattggcatctgaccccggccatgcgcctgcaggcgcagctcggcacggtcaagggtgtggaggccggccatggcatctcctacggccgcacgtacctgactccagacaacacgtccactgccatcgtgccattgggctacgccgacggcatccaccgctccgcctccggattcgatatggaaggtgccaagcatgtggagaagccgggcgggccagtgcgcattatgaccaccgagggcccgaagctctaccgcgtctgcggccgcgtgtgcatggaccagttcatcgtggatttgcacggttccgccgccgaactcggagttcacgagggcgacacggtcgaactgttcggcccgggtcgtggtgagcagtttgtggagcccactgccgatgactgggcccgtgccgccgataccatcagctatgaggtcttcacttgcctgcgcaatcgcattccgcgtctctacgagcacgccgccgaggtgctgcccgctgacgacctcgccaagctcgatccagccacgctgctgtaacactgtacggcagccgatatatgggcctatgcttggactatggaaacaacgcaagatggggaacgggtgctgagcgatgagggctacagtgcctttgatgaagagcgttgggcacctgaaccgccgaagtccaaggcccgtaccgcttttgagcgtgaccgcgcaaggctgatacattcgtccgccctgcggcgtctcggcgcgaaaagccagattctgattgctggtaccgatgatttcgctcgcacccgcctcacccacacgctggaagtcgcccaaatcggtcgacaaataggcgcaatgcttggctgcgatcctgatgtggtcgactgcgcttgcctggcccatgatcttggccatccgccgttcgggcacaacggggagcgggcgctcgccgaaatcgcgcgcaatattggcggattcgagggtaacgcgcagaccatgcgcattctgacccgtctcgaacccaaaatcttccatccggacggccgttccgccggtgtgaacctgacccgtgcagctcttgatgcagcggtcaaatatccgtggactttggctgaggccgaccagcatcccaagggggagcggtccaagaagttctgcgtctacccggatgatgagcccgtgttccgatggttgaaaatcggcgcacctgtggctaccaagccgatggaatgccagatcatggatctttcggatgacatcgcctattcggtgcatgatgttgaggattccatcgccactggtgccttcgacccgattgtgctcgccgattcacagattttggaccacatcatcgagcagacgcgcgactggtatgggaccaagtgggatgcggataagctgttggcagcattcatgagactcaggcgtgagcatatgttccctgcgcatttcaacggatcacgtcaagctttggcgcagttgaagaacatcacctccgacttgattgggagattttgctggtcggtggaaaccgccactcgcgatacgtacggaccgggaccgttgacgcgttactccgccaatatcgtgattcccgaggatacgaattacgagattgtggcattaaaaggcatcgccgtgtatttcgtcatggcgccgcgtgagagggagccgttccaccaggaggaactgaaaatcgtcgaggacctgatcgacgtgctgatggccgattcgccgcagccctccgacgcgctggaaagccagttcctggccgattggaatgagtccaccaacgacaatgaacgtttgcgcgtggccatcgatcaagtggcgtccctaaccgacaattccgccttggctctccattccatcctgtgctgaggctgttccgtggcgggcaccctcagtcagttgcgctgacagctttcctccctgagagagctatgacctatcccttggcttccctcgggtgaggagagctgtctccataggcgagtgagaggagccaagaaagtaacggtacatatctaccgtgtctcacacgtggcgctactctagagacttatggtcggaatgattaagaaagaagatgtcgagaaggtgcgcgccgccgcggacctgtatgacatcgtatccgcgaccgtaacgcttaagccctccggaaccggcacattcgtcggcctatgcccgttccacgacgagaaaaccggcagcttcaacgtgcgcccctcgctcggcgtgtggcactgcttcggttgcggtttgggcggcgacgtgttcaaatacgtcgaacaatccgagaacatcgacttccgtgaagccgtggaactactcgccgacaagtaccacatcgagctgcactacgagaacagtggcaacgggccgaaccgcgaaaacgccggctccaaacgcacgcgactgctggaagcctgcgaggaagcccagcgtttcttcgtctcccaaatcctgaccaaggaggcattgcccgcccgcaaactgctcggcggccgcaacttctcccaagccgactgcgaacgtttcggctgcggctacgcgccccaaggctgggataatctcgtgcgtcatttggcatccaaggggtttacacagaaggagatcttcgacgccggcctggcccgccaaggccagcgcggcatctacgactatttccgcggccgcgtgacctggcccatccgcgattcgaccggacgcacgctcggcttcggcgcgcgcaaactgtatgaggacgaccagatcgccgccaaatacatcaacacgccggatacgcagctttaccgtaagacccaggtgctctacggaatcgatttggccaaatccgccatcgtcaagaagcggcaggtggtaatcgtcgaaggctatacggacgtgatggccatgcatctggccggcattgacaccgccattgctacgtgtggtaccgcattcggtgccgaacatgccaagatcgtacgccgccttattgccgacgattcgctgggtgcggtgcaattggtcggtccgctgaaggtcaaggaccagccgttaagctcgcgcatcgtgttcacgttcgacggtgacgccgccggtcagaaagccgcgctgcatgctttcggccttgactcggcgttcctttcgcagacttttgtggccgtggccgacgacaatctcgacccgtgcgatctgagaatcgagcgtggcaatgaggcggtacgttcgctgattgcccgtgccaagccgctatatgatttcgtgattgacgctgccatcaatcgtttcgacctgacttacacgcccggacaggtcggcgcgatgaaagccgtggccccgctggtggcgcagattcgcgaccgctccctgtgggatgcctatgcgcgcaaatccgcaggacgtatcggcgtggaccttgaggtgatgcgccgcgaggtgatgaacgcgcgccggcagatgcacgtgcgcgatgaggacgcctatgcgcccaagcgtcggttcgaacgtgacgagccgcgtgtggaacccggcaccaacccgtacgccaatccagccacgcgcaaggctctggagcgccgtgatgccgccgaacaggcatacttcaagattgatgatgccgtgttcatcgccgagcaacagttcatggccacactgattcaggtgccgcgtgccatcgaccgtaccatgttcggccagttgaccatcgaccatttcatgacttcggtgttccgcaccctgtttcaggtgattgcggccgccggcggactgccgtccgacgacaccccgcagggtctgtggatacacaacctcatcaaggccggtgggcctatgttgaatcaggtcatcaatgagctggccgtcatgccgttgccattgcccggcgatgacactggcaacggtgcgcaacctgcgcagcctggcgtgcccggtggcgccggtgcgcccagtgctgccgccgtacagctgcgtcccgccgcgccagaagagcagcgttatgccactgaactcctcacccgactgctggacatgggcttcatgcgccaaatcggcttgtccaaacgccgcatggcccaactgcccgacggcgaagagaaaatcaccctccttggccaaatcacccgcatggaaaccgcccgcaaagacctccaagcccaaatctacggcaacaccgtcggctaatacctcccactgattgcgcgcatcttcgaatacgtgccggatgcataaggccatacaaccggttgccggattggatgggtgcagaagttgcggattggtcccatccaaattggactggtttgggtggggccaatccgattcgttcaataatgaagcgcgataccaagcagcgtcgaaacgaagggaaactcatgacgcagaatcgtgcggaactcaaccgtaatctggcccaaatgctcaagggcggcgtgatcatggacgtcaccacgcccgaacaggcgaaaatcgcgcaggatgccggcgcgtgcgcggtgatggcgctggagcgcatccccgctgatattcgcgccgccggcggcgtctcccgtatgagcgacccggccatgatcaagggcattcaggaagctgtctcgattccggttatggccaaggtgcgcatcggccacatcaccgaggcccgcattctgcaggccatcgaaatcgattacatcgacgaatccgaggtgctttccccggccgacgacgtgtaccacatcgacaagaaccagttcgacgtgccgtttgtgtgcggcgcgaagaacctgggcgaggcgctgcgccgcatcgccgagggtgctgccatgattcgcaccaagggcgagcctggcaccggtgacgtgattcaggccgtgcgccacatgcgcaccatgaacaagcagatccgcgaacttgtcggtctgcgcgacgacgaggtctacgaggccgccaagcagctggccgtgccttacgatctggccaagtacgtgcacgacaacggccgtctgcccgtcgtgaacttcgccgccggtggtgtggccaccccggccgacgccgccctgatgatggaactcggtgctgaaggcgtgttcgtgggctccggtatcttcaagtccggcgatccggccaagcgcgccgccgccatcgtcaaggccaccgccaactggcaggacgccgatctgctcgccaagctgtccgaaaacctaggcgaagccatggtcggcatcaacgaggacgagattcagaccatcatggccgctcgcggcgagtgataaatagccgcaggcgtgtccgctgacgaggatatcgaaacacatatccgttgtagggcgcctaagacttgcccccgctggcgggggctgtcggctgaaagtcgactgggggtggtgtcgcgaagatcgtcgaccaccctcagtcagctacgctgacagctcccgccagcggggagccggagaggacaacatggttgtagctgttgaatacatttccaaagaagaatccgcagacgccggaaccgccacgcacggcgtgaccggtattctggccgtgcagggcgcgttcgccgaacatgcggcggtgctcgacaagctcggcgccccgtggaagctgttgcgcgcggccgaggatttcgatgaatccatcgaccgggtcatcctgcctggcggtgaatccaccacgcaaggcaaactcctgcgttccaccggcctgttcgaaccgtttgccgcgcacatcaaggccggcaaaccggtgcttggcacctgcgctggcatgattctgctggccaagaagctcgacaatgatgagaacgtctacttcggcgcgctcgacgctgtagtgcgccgcaatgcttacggtcgtcagctcggcagcttccaagccatcgctgatttcggccaagccgacgacccacagcgcatcgcggactttccactggtgttcatccgtggaccctacgtggtgtcggtcggccccgaggctacggtcgaaaccgaagtcgatggtcacgtggtgggcctgcgccaaggcaacatcctcgccaccgccttccatcccgaactcacggacgacatccgcatccacgagctcttcctgtcgctgtagccgattcatctgccgttagactggtattcgaccgacgaatcaaggagacgatctgccatgcagttcacgctgaaccggcgcagcacggtgccgatgtaccggcagctggctgctgagctgcgtgaacagattgtctccggcgcaatggctgagggctatcgtttgccgcctgaacgcgagttagcctcacacctcgaggtcaatcgtaccacggtattacaggcctatcagcaactcaaagatgagggactcatcgcctccaaagtaggcaaaggcacgttcgtgctgccgttgcagcatactgagactgcccggattcctgtagtgagacataagccgattgacgaggagccgaaaccgagcgttgtgcggccgccgtggtcggtgttgttctccgactattccaaccgattcacctaccacgacattgcctcggctgagcgggcgcaacgcggcgataccatcatcgactttgccaccggctcgcctaatccggcggatattcccgacgatttgttgcgttcagtgagcattgaagcgttcgaatcgcgcgaattcgacggtcagccagaatcgcctatcgaaggattcgatgaactccgcgcattacttgccgagcatatgagcacacgcggcgtgcagtgcgatgtacgaaacgtgatggtactttccggttccgagcaaggcatcgatcttatcgtgcgcgcattcgtcaatcctggtgactgcgtactggtcgaacaatccacgttcttccccgcattgcaaacgttccgctcggccgatgctcgcatcatcggcgtgccggtcgatgaacacggcatgcgcaccgacctgctggaaggctattgcgcgcgattccgccccaaactcatctacacagttcccacgttccaaaaccccaccggcaccacgctgccgcccgaacgccgcagtgaactcatcgacgtggcacgacgctaccagtgcctaatcgtggaggacgatgcctacggcgacctgtggtatggcgggaagtcatccgattcgcatcgccccataccgctcaagggcatggagaacgcgggatatgtgatgtacttgtccacgttctcgaagactgttacgtcgggcctgcgcacagggtggattgtggccgacccgcacgtcatcaaccgcctggcggctctacgccgcatggtcgaccagcatacgagcacgtcatcgcagcgtatttgcttggagctgcttaaggaaggtcgcatcgccgagcatattcaaacgctgactgattcctatcggcggcggcgagacaccgcaatcgcggcattgcaacgattcgccccagacggcgtgtgttggactgtgccggccggaggctattacatctggctatccctgacggagggcgtacgctcgcttgacgtgctggaatcctgccgttcacaaggcgtcacattcatgccgggcagtgtgttcgatgttgacgaaatggatgattcccatatccgtctcaacttcgtgcgcccggatgccgccgatatcaccgacggcatccgagtcatctgcgaagcattagagcgggcgattcaggccagctgagcgacgagactacgtaccttatgccaatctgcgcgtagaatagaacaggtgcagtaacgggaatgttcatggaggaatgaatgcggcgttggctggtcaatgtggccaaaaatgaaacgattcttgtcgttgccgcaatacttgcactgatttcgtgttttgtagtacctccggatgatgaatacaccatgtacatccatgccagcaccatcagccagttgatttgcctgatgattgtagtctgcggatttcagcgcatcggcatcttccgcatcattggctcccgtctgctgcaacgtacttcctccatgcgcgggctggtgctcaccttggtggcattgacgttcttctccgcgatgctcatcaccaacgatgtcgccctggtcacgttcgtgccattcgctattgcggtgcttatcatggcgggccaagaggataagaccatactggtggccacgctgatgaccatcggcgcgaatgtgggcagtatgctgacgccggtcggcaacgcgcacaatctgtacctcaaagcgctcaccgaaatgtcgacgaagcgatttatcagcatcatggcgccgtattccttcaccgcagcgatactgctggtcattgtgatatccgtggtgttcggcagcaaaccagtgggcgatttgggcgatctcgaaaccggtgtgctcgctcccgaacgcagcaaacatcagcccgatgagatccgcatcaccggttacggcgccggttacggcggctggcgcacggtcatctattcactgctgttcatcgtctgtctgctggctgtttccggcaccatcccgttatgggccatgtgcgtgattgtggtcgtatcgttcctgttcaccgaccgccgcgtgttcaaatatgtggactggggactgccgttgaccttctgcatgttcttcattttcatcggtaacatgcgccgtgtgcctgaattctatgagctggcacgcaccctggtcggttcccatccgttggaagtggcggtggcgtccagccaggtaatcagcaatgtgcctaccaccattctgctgtccagcttctgcaatcaatggcgggcgctgatcatcggcaccaatctgggtggtatgggcacgcttatcgcatccatggcctcgctggtggcttataagaatgtcacgcgccaatacccggataagaaggggcgttacctcgccgtctattcggcggtgaacgtgctgttcttggtggtgctgctgaccttgagctggattatcgaatagagcctatcgggcatacacggtgggagagccggacatcctgctcatggctgaaaccgggatgttgtgaacctggctgatggccgcgtccagagtggaagtcgcggaagtcgttgacgtcatgggggatgagttgacggctttggccatcgggtgctgataggagttggagttgcgagccagacgcgccaatgcaggacgctgcctgcggaacagattcataaacatgccgcacactccttcatcgttggccgacggtctggtgaccgtcgtgatttccatcatggctgcccatatcggcatccgctatgggggatatcccccattattcccttatttcacacaatttcccctcatccttaagggtgattctttcgaaaatgtgcggggaaagcatgcgatagcgggcatgcgagaacccgcatgcccgctaaagaggcttattaccgtgaagtgaccagtgtaacgctatatggttcgatcttcatcgcgaacaatgacgacggtgtggtcgtcggtgttactgctggattccacggtgatgcgcaatttgccgtaatcggtggttttcccgctgactttggtgacgaatcgataccagccttccgtggtcacgatgatggagccagaggagacgcggggcggtgatacgtacgtaacggctgttggagtgcaccggtggttcggggcaatcggtggtcattctctggccatgtgccccacggatttcggtgccatagctgacggccgagcaattggtgaaatcccagaatcgcagtgggtctgcttgggtgcgccagcggtcagagcctgcggcgcgccaagtgtggtgatcgaggtagacgccgtcgaaactatagttgttcaccatgttggcgttcaatccaccgtctgcgctgtggttgatgtcctcgaagaacacgccgtacagtcgttcgctcacttgatgggtggagctccccaccgaaatccgcaccataactcaatcttacgtgtctgatgtgcgaaatgcggcggaagagttcaggcacagttcatattccggtcagtccttaatgccaaatcgccgttatacggccggtacgctcgaaaacagaggttaacgttagaagacgggagtgttgctgtgcagtcctcggtgggaatactcgagcgcatcgaccatatgtatccgtcgttgcgcccggcggagcgcgccgtggcacagtacattcgtgagcatgccgaagaagccgccgatctgactgtcggccagatggcggatatcgcccatgtcagccagcccacggtaatccggtttgcccgcaagctcggcttcggcggataccgtgaactgcgctatgtattgcggcatccggccgccgaacatcaggtgacgttcgacccactgtccgggttcgatttgaatccatgggacaatgtggaggagattcccgccaaggccgccgaaggtgcgaaaacgctcattggcgagatgtgtgatgccttggatgtcaaggcttaccgtaaagcaatcgcgctgattgccgaagccggttttattgatattttcggtgtggagaattcgctgacgcctgcgaccgatctgttcaccaagctcggctatctgggactcacttgccgtctcagcaccgatgcttacatgcagcagatcggcgccgggcatatgcgccatggcgatgttgccatagcgttctctcactccggaagttcgtcggatacggtcaaggcgctgcgattggcaaaatcgcatggtgcaaaaaccattgcgattaccaatgccgtgggcgtgcctttggccagttgggccgatgtggtgttgctgaccggacgtggttcgcgcgcgatctatggcaatgccattttctcctgcgtggcagatgccgcgcttgtggatatgctctacatgggagtgattctgtctaattacggccgtttctccgcggcgctggatgagtcaggccgcatgattcgtgaccgcgtgttcgagggctgagccgttagctctagggcgatataccgcggagcttttacacccctacgattagactgatgcgagtttggccccgtagctcagctggatagagcatgtgacttctaatctcaaggtcgacggttcgagcccgtccggggtcacgaaaaagcccttggaatcgttatgattccaagggctttatgtattagcgagcttcgagattactgggtgcacgacaggacaacgaaccgggaaacgatggaatcggcaaagacgggagatcctgatgcagagcatatggcagacaatcacggcaccgcccgtgaccataccgttctcgctcatgtggctatgcgtgttcgcactcgaactgatcatgctgccggaacgtatacgattggccagatatggcggctactggtacatgtacccctacgactaccggaccacgcagatggtgtcgggacgcaggatatggcaccggttcgcatcggcggccgtcgcggcgacgtggatgtggtacacggccatggaacacagtccctctacgggcaatccggactcgtcgatgggcagggtcttcggatcgtacaggaacacggtccagttcgattgttccgtcatgacacatcacggcatacgcaatctccgatatcggtcgggttttcgatggtccggcctccatcgcgtaaggaataatcttggcggatgtgtgcggcgggcgggaacacctcgtcgaaccggttcgcaatccttcgtccgatatcgtcgaaatcatcgaaataaattggcgggcttggaagcctgtccgtatgatgttgagctgtcgacgacaccgaagatgacgccgacgatttccgaaaagggacccataggaggagacaatgaggttttccaagacggccacggccgtgatcgccatgatcgccatgatcgcccccacggcggcatgcggcaccgacaacgcatcctcggacggcaagaccgagatcaccgtatgggcgtgggacaacaatctcaaggccaatgcgaaacagttcatgaaggacaatccggacatcaaggtcacgttcgccaacgccggcagcagcaaggacgagtacgtggccctgtccaacgcgatcgaggcgggcagcggagcccccgacatcgcgcagatcgaatactacgccatccccgaatacgccatcaaaggcgcgttgaaggacctcaccgacaacggggccggcaagttcaaggacttctacacgccgggcacgtggagttcggtcaactacgcgggcggcatctacgggctgcccatggactccggccccatggcgttcttctacgacaaggaggtcttcgacaaggccggcatcggcgaaccgcccgccacatgggacgagttctacgaggacgccaagaagatccgcgcggtcggatcctacatcaccaacgaccccggcgacgccggattcttcaatgccatggtctggcaggccggaggccacccctactccacgtccaaggacggcaagaccgtgaccgtgaacctcaccggggaccccggcgtgaggaaattcaccaagctctggcagaagatgatcgacgaggacctcatcgaaacgaagaccaagggcaccagcgacgactggtaccgcgccgtcggctccggcgagttcgccggtgtgatcaccgccgcatgggcgcccggcatgttcctcaaccaggcgtccgaaggcgccggcaagtggcgcatcgcccagatgcccgcatggtcggccggccgacacgaggtctccgagagcggcggcagctccctcgcgatcctctcctcgtccaagaaggccgacgccgcgtacaagttcatggcgtacgcgctccacaacaaggacgcggtcatgtccagggtcgaccagggaggcttccccgccgacctcgaatccatgaagaacgacaagttcctcaaccagaccaccatggtcaacaccaaaggcgagaccgtcgaatacttcggcggccagaaattcaacgccgtgttcgccgaggccgccaagaacgtggtcaccggattcgaattcctcccgtacgacgtgtacgctcgcagcatcttcaccgacaccgtgggcgcggcctacatgggccagggcacgctgatggacggcgtcaaggcatggcaggccaagctcgtcgagcagggtaggagccagggcttcaccgtcaaggaaggataggaacgcaagacatggtcggaatcaaggacgtggcgggcaaggccggcgtgtcgatcagcaccgtctcgtacgtgatgtcggggaaacgacccatctccccggccacgagacgcagggtcctcgccgcggcgagggagatcggctacgtgcccgcgcccggcgaacacgccgcccgcgcgacgaggacccacttcgtggccctgagctcgcccgttcacgattcgaccagctacacgaactacttcacctacttccttcacttcctcagacaggcacgattccacggctacgaaaccctcctgctgaccgaggagaacggcggggagcaactcgcacggctcatcgacaccggactcgtggacggggtcgtgctcatggacgtcaacatggatgacagccgtctcgccgtggccgccgccacgggagtgccgttcgtgtcgatcggactgcccggcgcggacacgggcatcccgtgcgtcgacatcgacttcaccctcatgggcggcggcatcatcgaccggctcgaccggctcggacactcccgcatcatgttcatcggcggcaaacacgtcgactacgaacgcggcgggggagcgaactacctggtccgcctgcggtccgccctcctcgacaacgcgcgatgccggaacatccgggtcgacgaacaatacaccgacgaggacgacttcgacgccatcgaaaccatcctcgacatggccatgctcaacggggacaccgcgatcgtgtcccaaggcggccccatgttcctcaacagcctcgtcgccgtggcccgcaagaacgggatccgcttccccgcggacctgtccgtgatctccgcgggaaccttcaccgacccgatcggcaggcggctgcgcatcgacgaatacccgctcttgcccgcggacctgtgccgcatgggcgtcgacatgatcgtccgtctcatggacggcgaaccatggcgcggcgaccgcgtcacgctcatcccgcccgtctaccaacgccgcggatcgctcggcgcgccccgcgagcctgaaacccgctccgcgacgacgcccggacccgcatcactcgcggcgacggcagcaccgtggaatacacgacgcgcaggatcgctggaggcgtcaccgcctccagctccgacggcagcgaattcacgctccgcgacaaccccacaggcgcacccgtacgatcccacaacgaccatgcgatcatcgaacgataacaaaggagccgatgatgacctctttcaaccgtgaacccctgcccgacgccgtccgcacgaacggcgcctccccgaacccgtggtggtcgaacgccgtcgtctaccagatttacccgcggtcgttccaggacacgaacggcgatggtttcggcgacctgaagggcatcacctcccgcctcgactatctcgccgatctcggcgtggatgtgctgtggctctctccggtctacaggtccccgcaagacgacaacggctacgacatctccgactaccgggacatcgacccgctgttcggcacgctcgacgacatggacgagctgctggccgaagcgcacaggcgcgggctcaagatcgtgatggacctggtggtcaaccacacctccgacgagcacgcgtggttcgaggcgtcgaaggacaaggacgacccgcacgccgactggtactggtggtgtcccgcccgccccggccacgagccgggcacgcccggcgccgagccgaaccagtggggctcctacttcggcggttccgcatgggaatattgcccggagcgcggcgagtactatctgcaccagttctcgaagaagcagccggacctcaactgggagaacccggccgtgcgccgtgcagtgtacgacatgatgaactggtggctcgatcgcggcatcgacggcttccgtatggatgtcatcaccctgatctccaagcgtacggatgcaaacggcaggctgcccggcgagtacggttccgagctccaggacctgccggtgggggaggagggctactccagcccgaacccgttctgtgccgacggtccgcgtcaggacgagttcctcgccgagatgcgccgcgaggtgttcgacgggcgtgacggcttcctcaccgtcggcgaggcacccggcatcaccgccgaacgcaacgagcacatcaccgaccccgccaacggcgaactcgacatgctcttcctgttcgaacacatgggcgtcgaccaaacccccgaatcgaaatgggacgacaaaccatggacgccggccgacctcgaaaccaagctcgccgaacagcaggacgccatcgcccgacacggctgggccagcctgttcctcgacaaccacgaccagccgcgtgtcgtctcccgttggggcgacgacaccagcaagaccggccgcattcgctctgccagggcgctcgcgctgctgctgcacatgcaccgcggcaccccgtacatctaccagggtgaggagctcggcatgaccaacgcgcacttcacctcgctcgaccagtaccgcgacctcgaatccatcaacgcctaccatcaacgcgtcgaggaaaccgggatacggacatcggagaccatgatgcgatccctcgcccgatacggcagggacaacgcgcgcaccccgatgcaatgggacgactccacctacgccggcttcaccatgcctgacgccccggtcgaaccctggatcgccgtcaacccgaaccacacggagatcaacgccgccgacgagatcgacgaccccgactccgtgtactcgttccacaaacggctcatcgccctgcgccacaccgaccccgttgtcgccgccggcgactaccgacgcgtggaaaccggaaacgaccggatcatcgccttcaccagaaccctcgacgagcgaaccatcctcaccgtcatcaacctctcgcctacacaggccgcaccggccggagaactggaaacgatgcccgacggcacgatcctcatcgccaacacggacgatcccgtaggaaacctgaaaaccacgggaacgctcggaccatgggaggcgttcgccatggaaaccgattcggaataaaccggacccaaccgccgccgaaccgacaagagggccccgcgccacgcatgaaccaacaccatgcgcggcacggggccctcacgccgtatcacggctgtcgggtcgatacacgacaccggtcgtgtgaccactgggacaggggataagagccaaggagacgaatcgccataacgatggattggctgcaatgtattggacggtctcgtgcgtgacagggcaacgaaggagttgatcatcacggccgatcagaatcatccgcgtcattacgaggaggagtccaagcggcaaaccgtgcagtcgtacgagaacggcaagctgtcgtcgcggatcagggaggagtacggcatcccgcgctccacgctgcagcgttgggtgcaggggatacgcaacagcggatcaaccaagggataacgtcctataagaaatcgatatatcgaatctgccttccttggctgttccattaggtaataatgtttcttatcgaaaagtgaacattaacaggagagaagattcatggttcgatggaagaagatagccgcgattctggcaccagtcctgctgctttcggcatgcggcagcacccagtcggcatcatccgccaacgattcgtcaacgggtccaaacgctgtcatcagcgtaaacggcaccgaaccgcaggtttccttggtgccgatgaacaccggtgaagtcggcggagaccgcatactcagcgccatcctcgctggtctggtcgcttatgacccgtccggcaagccggtgaatgaagtggccgaaagcatcacaccgaattcggacgcaacccagttcacagtgaagatcaaggacggttggaagttcacggatggcacgccggtcacgtcggagtcgttcaccaaggcctggagctatgcggcgaacgtgaccaacgcccagctgaactcctcgtacttctccatcgtcaagggatacgacgaactgcagaaggaaggcacgtcctcagacgctcagctgtcaggactggtcgtcaaggatgaccacacgttccagatcaatctgaacgcgccggactccgcactgcccagccaattgggttccgtcagcttcctgccagttccggaagcattctataaggatcctaaagcgtatggcgagaagccgattggcaacggtgcctataagctcgtttcctggaagcatggacagggcgcgaaggtcattcgtaacgacgattacaagggcaacttccccgcgaagaacggtggcatcgacttccggttctatacgaccttggactcggcatacgctgatgttcaggccggtaacctcgatcttctggatcagattcccgccacctcctactcttcctatcagaagaataagaatgtgaaagtgttcaccgcggccggttctcagacacagggcatcagcattcccgaacgcctgaagcatttcagcggggaggaaggcatacttcgccgtcaggccatcagcctgtccatcaatcgagacctgatcatcaagaagctcttctatggcacccgtgtcaaggcagttgattattcggcgccttccatcaccggatacaccgataatctgaagaacaagaccatcctcgaatacaatccacagaaggggaaggaactctggaagaaggcggatgccatctccccgtgggatggaacattgagcatcgcctacaacgccgattccagtgacaagcagtggattgaagccgtcttgcatcagttgcaggacaatctgggtgtcgatgtgcagccgcagtcatatccgacaaagaaggagctgcgcaccgccgccgtcgacaagactctgcccactccataccagtcgggttgggccccggattatccgaacatcgaaaactatctgacgctgcgcttcagctccgatggcggatacaacgaatacgactaccacaatgacaatgtcgacaaaattctcgccgaaggttccgcggcccccacgaccgatgatgccaacgccaagtatcaggaagccgaagagattctgctgaacgatttgccacagattccgttgtggtatcagaacatcacggcagttggttccaaggacattaagaaagctgcgttcacctataacaactatccgatgtatgctgatttggagaaatgatatgcccaccgtctatctggcagggggatgctattggggcgtccagacctactatgaccgggtgcaaggtgtgacaagcacagtcgcgggattcgcacaatcgagaatcccgcgacccacaggggagcagattgcttccggtgaagctggcgccgtggagactgtggccgtcgcctacgattcgcagcaggtctcactgcaaacactggctagattgcatgccctgctcattcaggagactccggccgatgaaaaaacacccatttcagagcatgctggtttctattggactgattcagaacagagggatgcattcgaagccgccattcgtgagcgaaaccttgctgatgtgaccatcgaacggctcactcgatttgaggagtcttccgaggaacaacagcactatctcgcatcccatccgggagccgaatgccatataccgctcgccttactgaacgaggtcgggaaataccagaaggagctctcgatgtagagcagtgtcactgcagtcaaatcgcttgtgtccatcgcggccctacaacgattagttattgatgagggtacagccaaggtgtagtcgactgcatgggacatggaaatgctgaaaaacggctcttcgggtgtttgtgtgggtgtggagtggagccgttggtcgtcggaccgccacacgtagtcgttgaggtcgcgcctcagctgctcgatcgtggtgcagtggttccggtacgcgagctccttcttcggcggcctgttcgtgttcgcgcatgatgttgccgatgcgtctgctggacgcggtgacgccccttctttccggggcggccttgatcttcctggcgccgtagcgttcgcggccgtcgcgtcaggccgcgcgcacgtcgccggcgattggatccgcacgctccgtctcgggatgctcgatcatccagtagtaggtggagcggggaacgcccggtatcccgcactgcgccgatatcgggcagcgggcggcgttggcccgtatcacgcctgccttcgcgcgaataccggcgccgcttgttctgaaacgtccacctccacctccttctcatacccgggaacacccttaagggatgcggcggctgtgcttcagctgtacactggcagcagatgtgccgaaaaacggctgttgccgaaaagtccgccaatggcgacgaacgagggaagaagggcccgtggcgcgagccattatcgaagtgagaaacctgcgcaaagagtatccggtcgaggatgagaccgtggtggcgcttgaccgcgttactttggcgattccgcaaggacagatttgctgtatcttcggcgagtccggttccggcaagtccacgctactcaaccaactcgccggtatggagaagcccacgcgcggcggggtgcgaatcggcggggtgccggtcagcaagctcaatgagcgtgaacttgcggcatttcggcagaagcacatcggttttgtgtttcagtcgtacaacctgttgcccaatttgacggcgctggaaaatgtggcgatgccgttgatgttccgcggagtgccaaaggaacgtcgtgaccgcgtggctcgcagtgtgctcaaacgagtcgggctcgggcatcgactcggccattatccgaggcagatgtccggcggacagcagcagcgtgttggcatcgcccgtgcattcgtgaccaagcctgaagtggtattcgccgatgaacccaccggcaatctcgattccaagaccaagaccgaagtcatgaccatgatctgttccttcgctcgcgacttcaaccagaccatcgtgttggtcacccatgacccgcagatggccgcctacgccgatcgcatcgtcacgctgcttgatggacgtatcgtcagcgaccagatcaaccagggcgtcactgttcaatcgatttcagctcagtccattcagtcggctcaatccgaccagttcgttcaatccgttcaacctactgcagtgccgtccgcatccgtgccgtccgtacaaaccgtctaaggagatgcccgatgaaacacctcaccacacgtatgcttgccatcatcgttgccctgcttgcctcgctatccatgatgctcgccatcgtttccctgcctcatctggcatacgccgtaggcgcggatgacggcagcgcgcagggggccgatcagagcgtggctcccacgccggtgtccgggccggtgccgaacatcatcgtcaccaacttcacctacggcggcgattccgtggccgccggtgccaaattcgacttgaacttcaccttccagaacatgggtcaggtggccgtcgcgaacatggtggtcacggtggacggcggcgaaagcttcgccattgcgggcggcacgaacaccttctatttcgatgcgctgtgggccggctattcgttgagccagactgtgccgatgcaggcgctcgcctcggccaaaagcggtgcccagccggtgactgtcagtttcaggtatgaatatctggactccggcgcacgctcctcgaaccagtccgacgtgaagatagccgtgccaatcagccagcccgatcgcttcgaggttggcgatccggtgccgtcagaccagattgtggccggtcaggagaccacggtcacgctggaatatgtgaacaagggcaagggcgacatcgccaacgttgaggccacgatggagggagagggttttgacgcgacgatgaagacccagtatgtgggcaatgtggcttccggggccaccggctctattggctatgccttcactcccaccgcttccggtgaactcaacgccacactcaaagtgtcctatgaggattccgatggacagagcaaaaccaaagagttcccagtcaaactctcggtggctgatgcggcgccgatggatgatccaagcagggtcgattccgatatgaatcagaatgccagccagggtttgccatggtgggtatgggcggcagcggcagccgttgcggttgcggtaatcgtaggtatcgttctgctggtgcgtcgccatcgcaagaagaaagccaagagcgagattgatgaagagtgggatgactgggctgacggcaatgccgacggcaaattagacactcagtccggcggcgatattgcaagcggcaagactgtgggcgatgctgcggatagcaccaccgcgaataacgccactgcaagcggcgacgcaacaagtacgtccgcaatcagcccgtccaccgatgccacgccgaccacggtgatcgagccggtgaacgccaccgccgagccgaaccagattgtgcccgatgactcgggccaatctgacggttccgctcaaacagtctgaaagttccggccatgcgattcagcgacattctgcgactgtgcagacagaacctatggcgacgtaaatcccgcacaatactgaccgtgctgggcgtcatcgtcggatgctgctcgattgtgctcatgatctccctcgggcagggcatcaacgagcagaatgaaaaaatgctcaaatcgatgggcgacctatccatcgtcaccgtctacaccagtggcggctatgccgggccgatgggcggcgggaacggatcatcgtcggcatccagcgatgccaagctcgatgacaaagcgctcgaatcgttccgctcgatgagcggcgtatccggcgtgactccgataatgaacttcccctacaacgtcacggccaaggccggcgcaggtggacggtacatctacgatcacgtgcagatcatgggcatcgatatgagccagttcgaacagatgggctacaaaatggtcgatggcagcaagccaaccaccaaagaccaggttcttgccggtgaatggtttgcttacgggttcatggacacgttgaaaaacggtgagatgcgtaccggcacccgtggcagcggctattcgtcttgcacattcaattcggccaccggcgaatgcgagccggatcaggatgaggacccgttcttcgacccgctcaccacgcaaatcagcctgaccaccggaaccaactatcagggcgacccatatgtgcagaacatgtacggcgggggaggcggaacgactgttggaagcgaccaatccgacaacgtcaccatcgatctgcgtgcgtccggcattatcggcggcgattacaacaagggatatgccacagcggacggtctggtcatggatttgcaggcgctcaaggatttgcgcgccaaagtcgatccggccgccgccaaaaaaaccgtcacctacgatcaggtgttggtcaaggctgcggatctttcctccgtgcccgaagtggaatcgcagattaaggcgcttggctacgagacttcgtcctatgaggacatgcgcaagtcgttggaggagcagtcgcgagcgattcagctgattctgggcggcatcggcgcggtctctctgttggtggcggccatcggcatcgccaatacgatggtcatgtccgtgaccgagcgcacgcgcgagatcggcattatgaaggcgctcggctgctacgtgcgtgatatccgcgtcatgtttttgactgaagccggcgcaatcggattctttggcggattgatcggatgcatgctgagtggattgatatcgttgggcatcaatgtggccggcaggatgtatgcgggcggtatggtcggcagctcaaacggaagttccggcgatggtgctggtggcacatccatatggatgattatgtggcaggcattggtcggaggtgaggacgtgacccgctattcggtgattccgtggtggctgttcctgtttgcagtgctgttctccacgctaatcggcctgctgttcggcttcggtccggccaacaaagccgtcaaaatcccggccctggatgccatcaaaaacaacgagtgatcgcctctgtcacctgctccaccgtcagtccataacgttcgttcagttcgcccagcggcacgcggtcggtaaattccttggctgcgccgaagttcagcacacgaggattgcggctgctgtccgagacatgatgattcgcatagtatgcggtcaccttctcaccccagccgccttccagctgcccgtcttcaagcgtgacgaccagctcgtggccgtcacgcaacgattccagcgcatccgcatccaacgacgtgcactggcgcgggtcgatgaccgttgccttcatgctatgttcggcggtcaacgcggcagccacctgctccgcaagcggatatgcgttgcccaatccggcgatcgcaacccgcgaaccagtctgattaatacgccaagccaaggggtcgctcccgctggtgggctgagccgttacgccagcaactcggtgtgctgcggatttgctcccgctggcgggagctgtcgacacagtcgactgagggtggccaacctgaacccgtccacccgtcaccggcaacaaactcggctcccgttccgcagccagaatcgcctcacccggcacccgaatcaccaccggcccatcgggagctccatcggctccagccggcagcgtcgcccatgccaaatcggccagatactcatctgccgaagtaggcaccagcatcgtgatgccaggaatattggcgaacatcgccacgtcatatgcgccggaatgcgtgttgtcggaaccggataggccgcctagaaaatcaagcaccgtcacccgagaccggttcaggctcatctcctggaagaactggtcataggcgcgttggaagaatgaggccgtagtggccaccactggtgtgccgccagcccgtgcgatgccagctgcgaaagccacggcatgcgattcggtgatgcccgtatccacataatgcgagcctgcgcgttcgcggaattcatgggtgatgccgttcgaccctggcgtggcgggggagatgaccaccaatcccggttcgctggcaaatcgcggttcgagcgcggccattgccatcttgccataatatttgcgcggatcatcaggcttgccgatggcggaatccgggttctgccaatgggaggcttcgcactgaccctcatgcggttcatggtcggacagattacaatgatccgaatgccacggttcacggtgcgatagattgctggacgggtggattccggtggcggagctggtgggcccgccgtcgtagccggcacccttcaacgtgtggatatgcaccacaacagggtggtcgatattgcgtacttcctcaaatgccgctaccagcgcatccacatcattgccatgctccacataacggtaatccagtccgaatgcgttgaataggttcggttgtgcagtgccgcccgaggcgcgcaaccgggcgagtgtcccgtacatgccgccgaaatcaccggcgatcgacatctcattgtcgttgagaacaataatgagattgccgccttgctcagcggcgttattcaagccttcaaatgccacgcccgagcttagcgaaccatcgccgataacggcaactacattgccgatgccgctatcgggcccctccatattgcgggttttcgccaatccgcaggccaatgaaattgaggtaccggtatgccccagcacgaactggtcatggtcgctctcgtccgggttcgtgaatccggtcacgtcgccgaatcggtttgtgtccagataggcggcagcgcggccggtgagcattttatgcacgtaactttggtgggagacatcgaacacaatgcggtcatgcggtgaatcaaacacgcgatgcagtgcgacggtggcttccaccatgcccagattggagcctatatgcccgccgtgaatatggccgtaatgcagtagggtggagcgaatttcgcgacatagctcattcagtgtattgggggagagtgctttgacgtcggcagggctggtaatgcgacgcagcagggtgacatcggcgagattgcctgagtcggtggaatgagtgttgtcgattgcgccgctggcatcgtgtgcactgattccgtttcccggcatgctatgcatatcctcgaatctccctccacaattcataccgaaatcgacatgctagcgctgcgcaggcggcaacgtgcgcggatgagggcaataccctcaacatctccgtaaatactgcaaatactgcggcgatgaggagggatagcggatttgatacagcatgcagcatggatgggcggtgttcacagagtgttgtgtgggaaaataaaggaggtaatttgccggaccttgtggtgaccggccgatcttcaaggagcgtgcaatgaaggccgtatatgcgtctgccgtcaatcatgatgacccgttatccgtgctggcggtgggagaccagcccgagccgcagagccggccattctggtcgaccgtctcggtacgtgccgtaaccgtgaatcatcatgatgtctggtctctgcagggcgtggggttgtcggccgaacagacgccgatgatcctgggcaccgatgccgtgggcattctggacgaggacattcccggcaagcatgggctgaaggccggtagagaggtagtgctgtacacgttcgtcggtactgatggtgccggtgtggctccgggggagcgtcgcacgattctttcggagaagtatcccggtaccatggccgagaaaaccgccgtaccttccgccaatgtgtttgccaagccgtccaatctcaccgagattgaggctgcggcattgggcaccagctggctgaccgcatattcattgctgttcgacgcggccggtgtgaagcctggcgactccgtgctgattcaaggcgccggcggcggcgtatccaccgcggcgattcagcttgcgcaggcagccggccttgaggtgttcgtcacctcacgtgaagcggacaagcgagccaaggcgttgaagctcggcgctcatgccgcatttgagattggtgcccgcctgcccggcaaggtggacgcggtgattgaatctgtaggagcggccacatggagtcattcgatgaaatccgtacgaccaggcggcaccattgccatctgcggcgctaccactggagatcagcccggcgctgagctgacccgtttgttcttccaggacatccgcgtgcagggcagcaccatgggttcgcgtgaggattttgctcgtttgctgcgctttgtggaacgtgccaatctgcatccggcgattgattccgtattctccggtctggatgccgctcctgaggcttttgccaagatgatagaaggcaatgtgttcggcaaaatcgccattgagctgtaaggcatgtcgaagtaagcgcccgggcgtacagtggacgtattctcaataactagggagtaaatgataatggcaaatgaatccaagcccgaagtcgcagtggtcatgggatcggccagcgactgggagaccatgaagcgcgcctgcgatattctcgaccagttcggcgtcgcctaccacaagcaggtcatctccgcgcaccgcacgcccgagctcatggccgagttcgcgcacaacgcccgcgccaatggcctgaaggtcattatcgccggtgccggcggtgccgcccacctgccgggcatgatcgccgcgcagaccacactgcccgtaatcggcgtgcccgtgcgctcccacgccctgtccggctgggattcgctgctgtccatcgtgcagatgcccggcggcattccggtggccaccaccgccgtcggcaactccggtgccaccaacgccggcctgctcgccgtgcagatgctctccgcctttgagcccgaactggccgacaagcttgaggattaccgtaacgaaatgaaagaaaaggtggctgaatccaatgcccagcttgtctgaggaaacaggcggtcgtgtttcgatgctgatgccgggatcgaccatcggcatcatcggcggcggccagctcggccgcatgatggctttgtccgcccgctacatgggcttccgcgtcggcgtgcttgacccgacgccgaactgcccgaccggtcaggtggccgacttccagatcaccgccgaatacgatgacaaaaccgccatccatgatctggccgtgcagtccgacgtgctcacctacgagttcgagaacgtggacgccgatgccatcgacgaggtgcgcggcatcaccgccaccccgcagggcaccgatttgctgcgcgtcacccagcaccgtgtgcacgagaagcagttcatcaacgaccacggcaccgccaccgcaccgtggcgcgctgtcaacaacttcgatgagcttgacgccgcattggatgatattcattatccggccgtgctgaagaccgtgtccggcggctacgacggccacggtcagctcgtgctgcgttccgacgccgacttggagaagatccgctcccgttccgaccgtggtggcggcttcccgccgagcatcctggaaggcttcgtcgacttcgcattcgaggcttcgatcctggtctccggcaacggcaaggacttcgtcaccttccccatcgtgcgtaacgagcaccgcaacaacatcctgcacatgaccatcgcccccgccgaagtgtccgaacatgtggctcgcgaagcgcatgaactggcgattcgcttggccaagggcttcgaactggctggcacgctggccatcgaactgttcatcaccaaggacgatcaggtcatcgtcaacgagctcgccccgcgcccgcacaactccggccactacaccatcgaggcctgctcgatggaccagttcgacgcccacatccgcggcatcgccggctggcccatgcccaagcccaagctgctctcgccggccgtgatggtcaacgtactcggccagcatgtggagccgacgcgcgcgctgatcgccacccacccggagtggaatgtgcacgactacggcaaggccgaagtacgccacgaccgcaagatgggccacatcaccgtgctcaccgacaaccctgatgccacggttgctgaccttgaggccaccggctgctgggacgacctgaaaaagaaggcgtgaccttatcgatggttgaacatatcgaacgccagaccaagcagaaggacgcgattcgcgccgccttggccgactgtgaggagttcatctccgctcaggacctgcaccgcaggctggaggacgaaggctcgaaaatcggcttggccaccgtgtaccgccagctcaacgccttggccgatgccggtgccgccgacacgatccgcctggacggccagcagctgttccgcctatgcggcgacgacggacatcaccaccacttggtgtgcaagcggtgcggcaaaaccgtggaaatcgacccgcccagcgaggcttggctgcgcaaagtggccgacggccacggcttcaccgtcgaatcccacaccctggaggtcttcggactatgccctgattgccaaaaggagcagaaagcgcagaaggctcagaaagcagtgagcgaataattgaatgggatcggcttcaaagccgatcccatttgttattccgctgctattccaccgacttcagggcgccgagcatgtcgaccgtcttcaaccgccggtagaccagcacgccgagtccgccgagcaccttgatggtcggcagttcgcggatacgtttggagacgttgagattcgtcagattgtagaggatcaccacggccagcagctcagccgcgagaatcagcacttccatgatctgatccggcaagtcgacgattgtggccacctgtttcttcgaagtcgtgttctgcacaatgcccttcgcgccgtccaactttatgagcttggcgctacgcgactccacattggaggtctcatggttcttgagcctcaccatataggcgttcgactggtactgttcgccgaacacgtgcttatagccacccgaagtcatgaacatgaaatgcccgatatgcatttcggtgatgccgtccacgcgcaccttgcgctcggtgccgctcgaatcggtgacggtaatcgtgtcgcctaccttggcgtccatcatctccgccatacgttcggagatgatcgcaccacggtcggtgagcacctgcggcttgtgcccggtgcgcgaacgcagggtgatgtagtcgccgaaattgtaggcgtcatcagtggcgatcagggtaatcgactgtttgtcgttctccgtgccggccactttcgacatctcctcgtagtagatcggcgcggactcggagacggccccgcccttcatcgccttggccacttcggcgtgctgcgaataatgttttcgtcagctttggtcaggccataatcgctgatgacggttatgtcagcgagattgttctgattaaagaagtcggtgccggtcatttgcatgtccgggccggtgacgaacaggcctacgagcgcaaaggagccaagcgtcatcaggctcacgatggaggcgaatcgacccttggattttgccatggtgacgcggatgtctttccatagcatgcgcttatggaatgacccgttgcgtcggcggttgcgcttggccttgtgcgcgtggggcgttctgccgggcgcggtataggagtcgtttgctgaatttgcggcggaatcggctgcggagtcggtcgcgggcgtaaggttggtcgtttcggtgaaatcgttgagatcggtcatactgcttaccactccagatccttgatatccatcgggtgctcgttcacttcgatcgatttgacgcgcgcgtcatgcatgtggatcacgcggtcggcaatcggcgcgatggcggaattgtgcgtcacaatgaccacggtcgcacccttcttacggctctgatcctgcagaatctgcagcacctgcttgccggtgttgtagtccagagcgccagtcggctcgtcgcacagcagaatcttcgggttcgtggccaccgctcgggcgatggccacgcgccgctgtccgccgcccgaaagctgcgcggggaagttgttgatacggtcctgaagccccacgccgataagcgcttgggtcggttcctgcgcgtctttcatgatttcggaggcgagctccacgttctccttggccgtgaggttggccaccagattgtagaactggaacacgaagccgaggcgttgcgctatgtcaagcgtgagtatgcgttcttcgacgcactgtcccgttcgggcaacgatatgcagatgtatgaccgggtcaaggatgtgttgaagcagatgctgcttgggcaggcggcccgtgtgggtgccgagctgagctacagcggcattccgcacgactatgcgctggaaattctggtctccgccgtctcatcgattatctggctatggatccggcgcggctgcaaggaggcacccgagcaaatctgcgccatcatcgagaaaaacaaaaccaccgcgcccgtatacatcatacggtaagcgcggtggttcgtgtcggaatttggccccctccctgagaggggtcaatccgcaggagaaatcggaaacctaaaactcagacagccagctcggccttgagttccttgaggtcggccaggatctcatcgtggcacttctcgttggtgtcgaaggcaaggtggcagaaggcgcactcgtggccttcgcggttctcgtggcaagcgtgcaggcaagccttgcccccgtactcttcggtgtggttgtgctcgcagccggtgtcgtcgcagcagtcgccggtgaagcagcagccgcagcggccacaggcggccacgccgtgctcgtgcttggtggcgtcgaacttggccagcgtgtccttgcagacggcgaaggtgccctcttcggtaacgatctcgtaagcatgctcatcgatggtcttgatagtcattgttgttcctttcagcgtttgttcgtctgtgactgtagggcggcagacagtagcggcgaaagttggtgaaagtgattatcaggcccattgctgctattaagagcaatgagacctcatgcagttttgtgtcggtaacgggccgattgttggccgagtgtcgacgcctggtataggtggtggcggtaccaatccaaatattggtggaacgacgacgatgagcgtgtctggcgtcggtgctgcgccaggcgttggcaatctaacgatgcgagtggagcttatatcgtcgctattgcgccaaggattggaagggcaccgatgctgaaggccagtagcgtcgggactgcgccattatttgttcgagcgccgacggccagtatcgtctggcgtcgtcagtggtccatcctttggtgaggtgccgacgctgagaggcggttcgatggcatgcttcgccgcacacttggggcacaggtcgaaaatctccagttcgtgggcgatggtctggtacttcaactgcttggcggctttgtcgatccactgctcaagtccgggaatctcgatttcgatggtccgcccgcattcgtggcatacgatgtgatggtggtgatgctggtccgagcactcgcggtagagggcctcgccgttgacgtggattacgtcgagctcgccttgggaggccatcatctacacattgcggtaggcggtggccgtgccgatgcgcgtgccgcgctcgcgcaggatgtcggtgatttcctgggccgtggcgaatcgggatagttccgccaggacctgggtgatgaggagtcggggtcgcgtcacgcgccgagtggtcgcggtttgctcgatgctcatgacgttatgcccctttccgttaacaaatgatattcattatcgttattagagcaaatcagatgcccggcatgttgtcacatgatttgaatcaactggcagaaatcccgcgtttcaacgaggcctgcgcgggatttctgccagttttgagccctataaaggcaaagcccccgcgtacctttcgttgtaacgcgggatttctgccgatatggggcgagtcatggcgcagcgcagcgctttccatttcgggaggcgcgtcatttactgccagtagaagtagccggtcggggcggctgcggctttgctggccgaccggacctgcagtatcaggccttggcgctcgtggccggcggagccgtaggcgccctgcttgatgacggcgtcgacggtgacccagtcgtgattgtgcggggtgccggccttgccggagctggctatgaacccgaatggggtcatgtcgaggatgcagcaggacatgaactggcgggacagctcgaactcgtccgcgtcgagcgtacgcgacttgctcacaaacccggtgacctgcacatggtaaccgacgtaacgctgcggattatggtcgatctgctcgaaccatgagccgaattcgtcgtcgctgatggtcagggtcttgttcgtcgtgtcgagtccgtgcagctgcgaggagccatcaggcttgtgcgagctgcggggaatgacgatagcgcggccaccggcgtactcgtcgaagccgccgctgccgctgctgggctggaacggcacggcgatcagcagcgccggaataatcaaggcgatcaggaaccgtaaaaccgaacgctccgtggcatggaacagtccgagccatgctgcggtcgccagcacgaacagcagtaccgcaccgatgatgagatacggcagcgaacgcggcgtggtcagcgtggtgtatgattcgcccaccgctgcataggcgatggccgcgcccagcgccgcgaaacacagcgcctccacgcggtcggggagtgtgactttgcgtttcatggctacgctcccatcaccagatgggcggcaatcgcggcgaggaagcaggccgccgccacggtcgcgatgaaccggatgatgaaccgtggccggcattccgtggccagcatcagcgtgttcttgaggtcgagcatcgggccgaagaccaggaaggcaagcatggcggagaccggcagcgcgccaatcatgctggcggcgatcaccgcatcggacgtagagcacagcgaacacaggaacgccagtcccatcgccgccagaatcagtacgatggcaccagcgtcatcgagcgtgcttgaaccgttggtcaacgacgacaatgcggtgcgcatgatggaggcgatgatcgtgccgaacagcagaatcggcatcatccgcataaagtcgtcatgcgtatgccgaatgaaatgcgtgaaccgctccaatccacgccccgtgccccgccggcggggctgtcgacaaagcccgactggggggtggctctcaggcgaatcacccgtcgcccctgcacaatcctcgcaaaccaacgaccgcccaatcgtcagcggcctctcacgcaccgcaggggagcggggcggccacaccgcgaacgacacccccgcgactatcgccgctaccatgcccaaccccgcgcgggccgccaccattcctggtttgtcggtgaatgcgaaccatgtggaccatatcgccatcggattcatcaccggcactgcgcacagaaacgtcaccgcacacggcagcggcaggcgtttgcgcatcagattcgcgaacgtaggcaccaccatgcaatcgcacaccggtaggcacagaccggccaccaatgccgcggccagtccgccggccaacgatttcggtatgtggcgggccagaaaatcggcgctgacgaacgtgctgaccgcggccgacatcatcgcgcccagcagcatgaacggaatcgcctgcaggataagccccgcggcaccggtgccgatatgcaccagcggaaccggaaacccacgcgactcgagcatcgcggaagccgcaatcaggaacgccaccagcggcgtgccgataatcagaaacaaatagttcgccgaatggtcctgttgcgcggtgttcacctgttccgtgcgctgcgtgcgaggttctttcatgcgaatatcacctgccatatcgccgtcatattagcaccgtacgcatgatagtggtcgagataatatgcgagttccccgcatgccgatggtacacatcgatatgcggggaactttgcacatggttgcctgggccgatggcgaatcagtgggccagcatctcggtggccacttcctccttgctcatggacaccgggtaatacgtgggccagttgtccatttccttgagggtttcttcctgtcgttgaagtgacgttgcacggtggcggcggtggcagaaccggccccggccttgtccgcgtaggcggcgttgatggcttcggcgaccttcagcacggcttccgggctgaaccacaggtgcgggttcgtagcaccatggtggtgatggcggccttcttcgccctcggcgtggtcgtgggaatgctcgtgctcgtcggtggcggtgacgcccatgaggccgcccacgttcacgatggtctggcgtttcttgtcaagctgcgccttttccgcccagccgtcgtagccggcgccgttgagcaccacgatgtctgccttggcgagcttggccagatcggatgcggtggcctcataaaacggcggttcgccccggcaggtgacggcatacggaaggaaatgggagaaagaacgtacgccgccggcctgtggagcggaccgtcgagttgttgttacgagacttgatggattgcggaatccacgatgttggttatggcttcatatacccctttcgtacggctgcggccagattctgcggaacctgaaccacttcgccttcaggcgttctgaccgtggccagctgaggcaccttggccttccagttggctcggcgcgaatgcgtgtttgctcgggacgccttgtacttgggcagtgccatcagccttgcctcgctttccagtgggggttcttcttgttgattacatacagatggccgcgccggcggacgacataggagccatccttgcgggccaatgagcggaccgatgccttgaccttcatgtccgttcctttcttcttgtcttacggtctttgcggaatgtgcggcgaatcacttgcgcccgtaacgagcgttgaacttctgcacctgaccggcggcgtcgatcaccacattcttgccggtgtagaacgggtggctgtagctggacacctccacattgacgagcgggtaggtgttgccgtcctcccagtcgatggtcggcaggtttacggccttggccaccagtgtggacttggtgaggaagtacttgtcggcggagcggtcatagaagaccacggggccgtattcggggtggatgccctcttgcatggttatggacctttggttgtgtggtgttgtgtggtgatatggatgagaatggcgttggacgcgcgggtggaatccggtgaattgagatggcctgagacggcctgacggccggttgtgccggcccgatcaccagctggatttcaccacgccgggcagtttgcccttgtgtgccttctcacgcagattgatacgtgacaggccgaacttgcggttgtaggcgcgcgggcggccgtcgatggaatcgcggttgcgcagacgggtggggctggcgtcgcgggggagggcctgcagcttgcgcatcgcctcggcgcgttcttcggcggtcagatgagggttgacgctgtcgcgcttgtattcggcgcggcgttcggcatacttggcgaccatgcgttcgcgctgcaattgtcggttgatcttactggttttggccatgtccggctccttgataaggctccggggcgcgggaatagcgccggccggagctgggacgagtgcattcgttcattgggcgcatgccgcaaggttcggaagatgagttcatgaaatggtgatagaggaaaccgccggaatgccaacaaggaaacgatttcggcgggtgcttaagcctcttcctcgcctcgcgactggtgtccaatgaacgaacagatggattagcgggtctctcggaagagcacccgtttgcggactaccggatcgaacttggtgagctcaagacggtccggcgtattacgacgattcttggtggtggtgtaggtgaatccggtgccggccgtggacttcagggtgatgaccgggcggattgcggaggatttgcttgccatgagtggtgctttctatgtgtgggtgtcacgctgttatgtcacgtatgtcgcgtacgtcgcggtgccatgtgggtgatgcagctcgttagcgcggtttgttgcgcggttacgcgccggcacagtggcgggcctactgactgcccgagcatgggggtgatgccgtggccggttcagttgacgttctgatcgcggcggatgcgggcgatcgccgcctcgatgccgatgcggtcgatggtcttgatgcccttggcgctcacggtaagcgtgacgtgccgctgcaaggacggcacccagtaccgcttggactgcaggttcggggcgaaggttcggcgtgttttcctgtgcgagtgggagacgcggttgccgaccccggcgcgtgttcccagaatttgacatgttttggacatgcctgcaactatatcataatgataaccattatcaaatcagaaaggctgtcatgattcatccggcattgcaatcacagggaaacgcggaggggcgcacgcccgtggtgctgctcaccggcgccgaccgcctgagcctggactccgtagcgttctcgttggtcgattccttcccgtccgtatgctcgattgcttatgacgtgcgcccgaacgaagccgtggaatccggtctcgatatcgtgcgcaacgtcgcgaagccccaggcaagcggggtggtgttcggcgagtccgattcgttcgggctcgaggggtgctgcatgagctgcacggtcaaacatgaccttgaacggacgctcggatcgttgcaagggcgggccggcgcgtttctggtctcgctgcctgtgggccttgaggccacgccggtcgcgcagtatctggccgattccttccgtctcaacgagtggggtgagtcgatgttcgtgggtgcggtggccaatgccgtaggccttgacgaattcgaagagcgattctttgacgacgaccgtttgtgcctgtacggcatgggcgaggagaacggcgtctatgacgagcgttcgaccggcgtagtggtctcccgcctgatccgtgaggcctcgtgcgtgctcgaattgccggtcattggtgccggttgcctggcacgccatttggatacagacggggagtgcgcctgccgcgacataatccgtgcaatcgccttgcgtgatgcgctggtctgtgaggatgcccacaccgtggggctcgtcgacctggtgcaggcgtcggtctgtgccgcgatgccgttgtgacatgtgcggcaaacggcagaaccccccgcgtccgaacgaaggtggcgcgggatttctgtcgtttccgaggccttaaatggcagaacccccgcgcgggtatcgttcggacgcggggatactgccgtttcgtctgccgaaaacggcgggatcccgcgttgccgtcgtcggggcgcgggatttccgccggcagcgcgggtgtgcgcgtgcaacacgccgatataaatgcaaatgataataattctcaatacatgttattctgtcgtgtgggtggctgagcgatgatgcagcaacagcaacatcgcccagccaaacagctgaattagagaggaaaatccaatcatgtccatcatgtccaacgccaagcgcgcgctcgccatcgcggccgcctcggcgaccctgttctcgatggccgcctgcggttccagcaatgccgccggcagcaagtccgattccagcagcgccgcgtcttccggcaagatcgaggtcgtcgcctccatcaaccagtggggttccgtggccaaggacctcggcggtagcaacgtcgaagtcaccaacatcatgaccaagaccaacgtcgaagcacatgattacgaacccaccagccaggatgtcgccaagtttggcaccgccaaggttgccgtggtcaacggagccgactacgacccgtgggccaccaaggccgcgcagtccaccaaggccgcgctggtcaccgccgccgaaaccgccggcatcaaggaaggcgacaacccgcacgtctggttctccgccaaggtgcgctccaacaccgcggacgccatcaccgccgcctaccagaaggccgatccgagccacaaggacgactacgccaagttcaacaaggactggcatgccaaggaagaccagctcgaatccaagatcaaggacacttcctccaagaccgagaacctgccctacgccgccactgaatccgtggcttggtacttggccgacgacctcaagatgaccgacgccactccgaagggctacgcccaggcctccgccaacgagagcgagccgaccccggctgacatcaaggacttccaggacacgctgaaggtcggctccatcaagatgctggtcttcaacagccaggaagccaactccaccaccgaccagatcaccggcgccgccaaggatgccaacgtgccgatcgtggagctcaccgagcagatgccaaagcagtacaccaacctgcttgactggatgagcgcactggtcgaccagttcgccgccgctgtgaagtagcccgaaccgcatatgttgccgcatatgcatgcaggccaactcgataatggggcgtctgaaaggattgtgtggggacacgccttaaggcaattcgaatggcctgatattacgcggcaatagatgcgatatcagggaaggctccttatcaatcagggtgctttggggggtaccccgaggcaccctttgcgttagggtaaatagttaggaaacagtaagaaaaacagtggaattatggattttccaaggttcggcggcaacaatatgcccttgaaaagtcacatacggaaacagacgaatgagcgaaaacactagcagtactaccacagtgaaaccccgtttcaagctttggtccaagcgggccgaagccgacgaagtcacgcccaagcgcacgtataagcctttccctagctgggtatacggcgtgctgttcgttatttttgacatcattgtcgtggccgcgctcgaagtgggcgtctcttccagctccacccgcgtgcagttatccagccccacggtcggatttggctttgtgagcaagatgtggaccgatggcaacttcgtattcgtgctcaacgtactgcttgtggcgctgctgtatctcatgctgcttatgttgttcaaccggttctggaccgccagcatcgtgattcttggcgtcggcatcattgtggccaccatcgaacacttcaaagtcgagattcgctatgaggccatcttgccggccgacctcggtttcctcggctcgaacaccggcaatatgctgacgttcatcccggctggcgcgcatgtaacgattcttgtggcactcggcgcgttcgccgtactgcttgccgcgattctggtgatgcggcactttgacgggcgcaaaggccgcatgattcgtacggacaatttgagcttgaatctcacctcccgactgattttgctgctgctgccggttctggtattcgcactgtattgcattcaggtgagcaccaccgactccgtggccaacaagttttctcgtaccatgggtgacattccgtccatgtgggattccgtatatgacgcgcagcgcaacggtccgctggtggcgttcacccgccagctcaacccgaaaatcatggacaagccaagtgactattccgaggaaaccatgaagaaggttgcggcccggtatcagcaggaagccgaaaccatcaacgcttcccgtaccaacaacctcaatgattccaccgtggtgtacgtgctttccgaatccttctccgacccgtcgcgtgtgccagggctgaaagtcaacaaggattcaatgcccaacatccgcaaaatcaaggcaagcaccacttccggtctgatgctctcctccggctacggcggtggtacggccaacctggaatacatgggattgtccggcctgagcatggccaacttcgattcctcgctatccagcccataccagcagctggtgcccagccagcattggacccccaccatcaatcagctgtggggtgcgcccgccaactcgcttggttaccatccgtatgagtccagcatgtactcgcgagccacgaactacaagaagttcggcttctcgcacttctacacattgaccggaccggacgtgatcaagtatcaggacaagatcgacgagtcgccgtacgtttctgataagtcatcttatgattccgctttggagggcatcaaggacggttctgcgagcaagttcatccagatcatcaccatgcagaaccacatgccctaccacgaatggtatgagaacaacgactacaccgccgaatccaccactggtacgccgctgggcgacgacgagcagcagtcaatcgagacctaccagaagggcgtagagattaccgatcaggccacgcaggagttcctggacgagctggatgcactcgataagcctgtcaccgtggtgttctacggtgaccacttgcccggcatctattcttccgccagcgaggatgcaaacaactccctggcgctgcatttgaccgactacttcatctggtcgaacaaggcctcaagcacccaaggtaacaaggccagtgatgcggcctactcgtcgccgaacttcttcgtggcgcaggctgccgaacatatggacgccgaggtgagtccgtatctggcattcctgaccgaaatgcatgccaagattgccgccatggaaccgcccgtggtcaacaagattcagggctgggctcgtattcccgaaggccagaacatctatctcgaccaaaacggcaacccgatgtccgagggtgattttgacgccgaaaccaagcagctgcttgccgactacaaactcatccaatacgacatcaccgccggcaaaaactatctgaaagatactgattttatgacgctgccgtaaagcagacggcctagtaggctgtctgtaggcagcgtacgagccgacaggcgagccagcaaggcgcgggtgcagcccgtctgaaattgcagtagcactgccgtaaagtaagggggcttccatgacgaacgagactttcgaacaacttaaagttgcctacgaatccgggctcacgcggccgctggcatggcgacgtgcacagttgaacgcattgcgccgtctggttatggagaaccgtgatgctttcatctcctcggccatggccgacttgggcaagcccgcggctgaaacagtgcttatggaactgaacctggtggatggcgaggcgcagtttgtacgcaatcgtctgggcctgtggactgcccggcatcctaaggcgatgcattggatgctgcagcctgccgctggatggacgatcgccgagcccaaaggcgtggtgcttatcatctcaccgtggaattatccggtattgctggctttggagccgatggccgacgcgctcgccgcaggcaatgccgtctgtctgaagccgtccgagctctcaccgaatacatccaaactgcttgctgaactcgtgccgcaatacctcgatgccgaggcggtgcgtgtggttgaaggcggacctaaggaaaccggtgatctgctgaagaatccgttcaaccatatcttctataccggtggcgggcgcgtcggcaaaatcgtgatgagggcggcggtcgagaacctgacgccggtcactttggaacttggcggcaagtcgccatgttttgtggatcgtactgcggacatcaacgtggctgcacgccgcattgtgtggggcaaattcaccaatgccgggcagacctgcgtggcgcctgactatgtgcttgccacgccggatgtggctgaagcgttggccaaacgtattgccgtggcagtcaccgagttctatggcaagaacccacaggattcgccgaactttggccgtatcatcaacgaacggcactttgacagactctgcaagctgctgccggtcggtaccgtgccctctgatgagccgagctctccgctgattcaggtggcgtctgcggttggtgctgcggtggacatggtcgggaaacgcattaatgccgctgcgtctggaaatacggcagctgaggcccgtcctgataccgctgagaccggtattgttgcggtgcctggcgtggtggatccggccggccgtgtgatgtgcggtggtaaggtcgaccgggctgctcgctacgttgctcctaccgtgctgtacggcacgcagccggatgcgccggtgatgggggaggagattttcggcccgattctaccgatcgtggtggtcgaagatgccgaggctgcaattcgtttcatcaatcggcgatctcgcccgttggcagcatatgtgttttcgcgcgaccatgaagtgcggcttgccttcgagcgccagaccagttccggtgctcttggatactcattgccgctgggccatctgctttccagccgactgccgttcggtggtgtgggcggttccggtatcggtgcgtatcacggcaaagagggcttccgcacgttcagtcacatcaaaaccgtggtcagcaagccgcagttccccgacaccctacggttggtatatccgccattcaacgaggccaaagccaagctgatggatctcatctcaaagctgagttgaatgatgatgttttcggtgaaattttctgctattcaccggtggttactctgatacggcgaatgtttgctgtctcggttcgtaaaaaagagtcaaaatcgactaccgggacggaaaaatttggcccggtagtcacgtcaatcgtttgatttgactaccgggccaaaatacgcggctaacgctccatcatcacgcgttcaggtttcctgaagtagcagaagtggtgcagctgcaaggcgcgtcgaggagggtgccgaaccgtatagaggacagcccggtgggctgtcctcaggtgaggggagcggttgtaccgcaacggttgcgtgtagcgcaacaggtacgtcgacgagacagcaacgcggcagatgcgccgcttctgctacttcagggctttgaagccgatgtcgtggcggtagaacagtccgcgcagttcgagcttgtcgatgatcgcgtagaccttgtcctgggcggacttgatgtcctgggcggtggtttcgacgagcaacacgcggccggagttggcgatgagtccgcccttgtcgtcggaggtgacgcccgcgtagtagacgtgggaatcctcgtcgacttcgatctcgggcacatgggcacccttgatgacgttctccgggtagccgttggaggcgatgaccacgccgagggtggcgttggagtcgtcccacgtgaattcgggggtttcgccattgaggatggcggaaatgccggctccgagatcggaagtgagcttggggagcacgacttcggtttccggatcgccaaaacgagcgttgaattcaatgaccttcgggccgtcggcagtggcaatcaggccggcgtacagaatgccggtgaacggcgtgccttcttcagccatgccctcaacggtggggcgcacgatagtttcgatggcttcgtcaaccacggactgcggaatctgcggaaccgggctgtaggcacccatgccgccggtgttcgggccttcgtcgccgtcatgggcgcgcttgtgatcctgggagattggcatcggccagaaatcggtgccgttgacgaagctcatcagggagaattcctgaccgtccaggaagtcctcgataacgaccttggcgccggcagagccaaagcggtggtcgataaagatgtcttcgagagcacgctgagcggtgagctcgtccatggccacggtcacgcccttgccggcggccaggccatcggccttgataacgatcggagcaccatgctcgtgtacgtagtcctgagccagctcaagatcgctgaaggtcttgtagtgggcggtcggaatgttgtggcggtccatgagctgcttggcgaaatccttggagccttcaatctgggcggcggccttggatgggccgaacgccttgatgccggcggcggcgaaatcgtccacaatgccttcgatcagcgggacttccggaccgacgaacacccagtcgtagtcgttgtccttcacgaagtcgatgagtgcggcgtggttcgactggctgagctgcgtggtgtggatgccgtccttgagcatgcccgggttgccgggggccacggtgacttcgtcaacgctcggtgccttgagcagcgtgtaggcgatggtgtgctcacgcgctccggagccgatgaccaatactttctgacccatgttgttcctttcctgcggaaagcgagttacttcagtacgatttgcgtgccggtggtgtcggcggtgatggagccgagcacgtaagcgggctcgttgttgtcggtgagcagcttcagcgcctcgtccttgcgggcgggatcgatggcgagtaccatgccgatgcccatgttgaagatgttgtacatctccttgtgatcgatgtcgccggccttctccagcacatcgaaaatcgggagcacaggccaggtgccgagctcgatctcagcggccaggccgtccggaatcatgcgcgggatgttctcgatgaagccgccaccggtgatgtgggccacgcccttgaccacgcctgccttgaacagcggggagagagccttgacgtagatcttggtgggggtgagcagcacgtcgccgagcttttcgccgcccagctcgtcaagttcggtgtccacggtgtagccagcctgctcgaacagggccttgcgcaccagagagaagccgttggagtgtacgccggtggagggcaagccgatgagcacatcgccctcggcaatggtggagccgtccacgatggcggacttttcggcgacgccgaccgagaaaccagcgagatcgtattcgtcctcgtcgtacatgcccggcatttcagcggtttcaccgccgaccagtgcggaaccggcctgcacgcagccgtcggccacgccggctacgacctgctcgagcagagccggatcgttcttgccgcaggcgatgtagtcaaggaagaacagcggttcggccccctgagccgcgatgtcgttgacgcacatggccacgcaatcgatgccgatggtgttgtgcttatttgccatcttggcgaccatgagcttggtgcccacgccgtcggtgccggagatgagaaccggctctttgtatccaagggaagccaggtcaaaaaggccgccgaagccgccgataccgccgaccacaccggggcggttcgtgcgagccacgtgcgacctgatgcgcttgacgacttcgtacccggcttcgacgctcacgccggcgttctcatatgcttgtggcatttggttgggcctttctacttattctggctcccctctggaggggagctgtcggcgaagccgactgaggggaggcaagcgcctccggtcaaggagttgttggatgggttgatgataagttactgggcatccggctgcacggtgttgtactcgttgccgacgtacttgctcttgtacagcgcgaactcaggcagtcgcacgcgatcctcgggggtgagggacttcaggaagtcggcctcatagtcgtccagagcggtggggtagtcgccattgaagtaggcgacgcacaggccgccgtacggggcatcggcgttcagtccgatggattcgaccaggccgtccagagataggtaggccagcgaatcggcgccgatgtagtcgcgaatctcttccacgctcatcttggctgcgatgagttccttggtggtggagatgtcgatgccgtagaagcacgggtacttgagcggcggcgagctgatgcgcatgtgcacttcggcggcgccggcctccttcagaagctggacgatgcggcgggaagtggtgccacgcacgatggagtcatcgatgacgatgacgcgcttgcccttgaccacgccacgtacggcggacagtttcatgcgcacgccctgctcgcgcagttcctgcgtgggctgaatgaaggtgcgagccacgtactggttcttgatcagacccatctcgttgggcagcccagccgcttccgcgtagccggaggccgcggatagggaggagttcggcacgccgatgaccatgtcggcatcgaccggcgattcctgtgccaggcgtgcgcccatgcgcttgcgggcggagtgcacgttgatgccgtagatgttggaatccgggcgggcgaagtagatgtactccatcgagcagatggccagctgcgtgttgttggtgtactgcacgatcttgtagccgtggtcatctatcaccacgatttcaccggggcggatgttgcgcaccagctcggcgccgaccacatcgagggcacaggtttcggaagcgagcacgtaagcgccgttcttcatcttgccgagggaaagcgggcggaagccgttcgggtcgagcgcgccgatcatggcgttctcggtcatgagcagataggcgaagccgccgtgcacggtgttgagcgcttccttgagcttgtccataaaggtgcgttgcagggagcggcggatgaggtgcatgagcacctcggtgtcggagttcgagtggaagatcgcgccttcgtcttccagcttgcggcgcagtgacgggcagttcgtcaggttgccgttgtggcacagagccacgtcgccatcatggaagcggaagatgaacggctggatgttgtccgtggtgccggagccggccgtggcgtaacgcacgtggccgatggctcggtcgcctttgagccgtttgatttcgcgctcatcgctgaacacctgggtgagcagtccgagtccgcggtggccggtcagatggccgtgatcgttggagacgatgccggcaccttcctgaccgcgatgctgcagcgcgtgcaggccgaaataggtaagtcgggcggcgtcggggtggccccacacgccgaagatgccacattcctcgtgaatgtcttcgagttcagccgacaagccaaagctcctttttcaaacaggggattaactatctgtcaaccctaccaatcggcggctacatcgcgtgttgtctcacagcgaatcattctcaataagaaaagtgtgcgggtgaaaggcggcaaaatgaacattggtcaccgagaagccctgatattccgtcaattgtggaaatgttcgattgtgccgaaatgtttggattgctcgcacttttcttattgagaatgattcgctgcgcactgtcgaacaaatgttcgattgctttgctatgctgatcaagctgctggcagtggataaggaggtgatggcgatggcccaagacatgcaacgcgagcatgtctatatcgccatagacctcaagtccttctatgcctcggtggagtgtgcggcgcgcgggctcgacccgttgaccacgcatctggtggtggccgacgagacccgcaccgacaaaaccatctgcctggcagtctcaccgtcgctcaaggcctatggcattcctggtcgtgcacggctgttcgaggtaaaacaacgcttgagtggagtcaacatcgagcgtgcagcccatgctccctcaggccgattaatcggggaatcctgcgatgcacgcgatctggaacgctcgccaaggctcaaggcctcgatggtcatcgcgaagccgcgcatggcgcactacctggaagtcagcgggcaaatttacggcatctacctcaaatacgccgcgcccgagcatattcatgtctactcgattgatgaggtgttcattgacgccacgccatatctgcgctcgctgggcatggggccacatgcgatggcgcgaaccatcgtgcgcgaaatccttgccgaaaccggtatcaccgccactgccggcatcggcaccaatatgtatctggctaaagtcgccatggatattgtcgccaaacatatgcccgccgatgaggatggcgtgcgtgtagccgagctgaatgagatgtcatatcggcgtctgctttgggatcatcgtccgcttaccgatttctggcgggttgggcgtggctatgccaagaagctcgagcatgccggactgatgaccatgggcgatatcgcccgatgctcggtgggtcgtgcttcggattactacaacgaagacctgctgtaccgcatgttcggcgtgaatgccgaactgctcatcgaccatgcgtggggctgggaaccgtgcgagattgaagacattcaatcctatgagccggatgcgcacagcatcagcagtgggcaggtgctcaccggtcccgccgactatgccacggcccgactgattaccaaggagatggccgatgcgctcgccctcgatttggttgataaaggcgtgctgacgaatcgactcacgcttgccgttggctatgacatcggcagtttggacgcgtcgaagctcgattcatgcgctgattatgcgatgaaacgtgccgctgagcgtgcggcgaaaagttatcaggggccggtgaccgtcgaccggtttgggcgtaaagtgcccaagagcgcggtcgggtcgattggtttgggtgattttacgtcatcttcggcgcgtatccgtgaggccatgacgatgctgtacgagcgcattgtggattcacgcctgctcgtgagacgcctgaccgtcatcgccgatgatgtggccacgccggaggagcttgccgccggcaaacgctatgagcagctcgacctgttcggtgatgacgaggctcaatcgtatgggtccgagcccgctgatgacagagatggtgagcatgatatccagcgtgcgctgctggatgtgaaacgtaaattcggccgcaacgccgtcatcaaagccatggatatggaagacggtgccaccggtcaggctcgcaaccgtcagattggaggtcatcgcgcatgaccttgcaagaaagtcacgcatacgacgacatcatcaacctgccccatcaccagtcgcgcaagcatccacacatgtctcgccgccagcgggctgcccaattcatgccgttcgcggctctgaccggttacggccaagtcatcgagcagacagcaaaaaacgccgaaaccgccatcgctcaggccgaggcccaaggcgataccgatttcggcgcttaacaatcgcttccgttggaggaagccgcagatccgtcagcccacgtgacgctcaaagcggtggaagccagtgatcttgtcgatctcggccatcgcatcggctggaatcttgaagccggcggccttcatgttgttctccagctggctgggcttggaagcgacttcggtgaacggaagggaaaagagcgtcactgttgcggatttgactggtgttggtgtgaaggctggtattccgcggacgcgctgtattgctattgccaatgagatgcaagataggattcgtgatgctgggtttgccgtccgagattgatggtttcgccatacttttaggtatctacttttagtttttccaatacgcattctctagtacgtttgccttttgaaaagcttcgcgataggcggtgataaggtccggcaaacgcattgaggcgttggccgggctggtggagggcagttgggtcataccgatggcgatgccggcttcggtcaggcgcggctcgataagtttgcggtaaagttgcgctgatttcgcgccggttgcgaagatgtgggcgattggagcgccgcgcaagattggtgccaagtcgttgggcacggcattgcggatgctggcatcgctggctccggtgatatcgcaagaagcaatgacatcccataacgcaatgtggtggcgcagagcaaacgcacgacgggactcaggtaaatcaccgacagcgtcagtaggatcagcggagttggcaaacagcgcctgcatcaccggccaaaaccggttctgcggatgcatatagtaaaacgccgccgctcgggatttcggactcggcatcgatcccaaaatcaaagcccgggactcaccatcccacaccggcccaaacccatgctccacatgttcgctcataagccccatattatgccgtttggtcttgaaaatagttcgggggcggacagttaatgtcatattccctcaaagagaagaaggatttacaatgaaaaaaggtggaagaaattgccagtgaaggcacaagccattcttattggtgttttagtcgtcgtttgcgcaattgctgcggtatttggatataggtcagttgacaatatgctgcatcctcaggcgactctgaccaattcggttgtggccaggcagttggaaaagattcaggatcttactacggccaaggaaaccgattttggttttgaagagtataaggaaggcaacattgctccacgccagatcgtcctcgaagccatccggcaacggaaccagcggattcttccacatccggaaatccgcaaccagccgcttcaactcctcgacataccgtcgctcatccaaccgaatgaacatccccactcaccctcctttacactaccatcccagcacacaaccagacgtcacgtcatgggcagcgccgtacacacgccaatgacgaacaacgcctcggcggtgagccagaacgcggccggccactcgccacacgactcacgacgattatccacacaaaaacaggcagccgccaaatccaacgggaaccacaggaacccaacgaacaacgcaaccagcagggccgccaccaacgcgaaaccgctcacatgacgggtcaacgcgatgccgatggccgcgaccagaccaaccacgccgccaccatacgatatatagcgaggaagaatgttcgacccacgatgccgatcctcccggtacaggaacagggaacccgacaccagcagtacaccggccaccaagccggtcacccaccaaccacccgacgcgggttgtgccaaaggcgcaggcagacgatcagacgaccagtccacgaaatcccccggcttcaacaagccagtcgccacataccggtcccacaaccacctacgaccaacctcctggcccacaaacgaaccagccgcaagcatcgccaaggaggcgaacatcacgaaaggcacggtcagacgaggccacaaactgccaatcgcgtaaacgatgaacggagacaacgccatcgacgcaaacacaatgacgaacaccccaacattggggacggccgccaacggccaccaatcacccgccccattcgcctttgccgcatccatgaacactacctgcaccaccacggacaccacaaaaacaaacaggaaccacaaagacttcaacaccacgccacgcattccgaacgcacgacgccccggacgcggaccatgcagatgaggaaccgtcaacgccaacaagccatgactctcatactccagagtcggaccaccattcgccgcagaccgttcatacctgtctctatcaatggtctttaacatatccctgaccgcaggatcgttccgatctcccttagcaagcagaaactgacggaactcctcatcagactcatcctccgaaggagactccgataaacgtgcatattgctccggttgccgaccatcatttctagaatgcttactcatcgtcaatcatccatcctttatagatcactgataccaactcgaatggcattagatgcctcagccgccccatcggacaactttcccggtgcctgatatatggtcttgaaattccacaaatgatcaggatccggaacgaacgtcttgaaataatcctgtggcgaatgcttccactgcagaccaccatccgcagtcggattcacgaaaggcttcaccactttcgccgtatgccaacgtgtcatacgtcgcgttggcatacgacacaacatgctgaccaaaattcatggtgtcccacaccgtccgacgggcgtcgacagccgcgatattcttcatgtcgtggataccccgaaaatcggtatacccggttcgggcattcataattgtgtcgccgatggaccacccatggcctttgctccaatctccgaatctcttgaactgaccatcccagaaatccctcatcaccgtgttgtttgggttagaatgagcggcattcgcggcctgtttcgcatcctgccatccggagacgaaacgattccacgccctgccactgttcttcaacgaatgctggataccgactacggtgttatgcattccctcacctagagcattccatccctgccttatcatccccttggcaaagactttcgcgccgtcatgattcaaagtatccaacacatgctcccgcgtttgcattgtccactcgcttccgtcacttagtagcttatggaatccgcgattttcagaagcttcttaccccacttagtcggctgccacagtcttgcgcgtaaagctttttgtaaattgcgttaatcaccaccatgtctctcctcaataaaaaaaatcatttgtgatgttctatacgtttgaggcccgtgccggcgtcgatctgagtaaggctgagattgatgtcaataagcataatcgaaccatcgacatcacgctgccagcacctactatctagtcagtttcggtggacccggattcattgagattctttgatgaagaatcttcactatttaacggcaatgaagtttcagatacagcagatgccttgaaagacgccaaaacgcagtcggaaaagaaactgaataagggggatttgttgaagaatgctaatgagcaggcaaaaacggtgattgaaaagatgtattcatctattgcagaaatggactcgtatacggtgaatatccacacaacagagccgaaaaaaatagtctacattgttgccaagcgctgttactcatgctatgaggcatgagtaacagcgcttttttatggtatagcaaggtcaattatttatcgtcaaaaatcagttgggaactgatttattcttggaggttatgcagtcgcgtcataggaaaaacgaggaattgagaggactcttatgatttcctatgtacgaaacgtgggtaagacggtacttgcagcggtcgttagtttggtgttcatcgttggcgctgcaggctgcggtaacactcaaaaggatgacggtccagactatgcggatgatgaggcgatgtccataatcgcaaaagcgtatcagaagcgttcggatgttctcgaccagtacgagcagaagaaagataccgattccgtcaagcatgtcaaagatgctgttcaggctgaaatcgataacgatgagcctttgaaagagcggcagttcaaggattcgaagttgcaggagaaagtcattacttatatcaacctgcttgaggattcacaaaaagtgaacgaggattattcctatctcagctcggattacagcaccgaatggactaaggtatacgataagcgttcggcattgctcaaggattttgtcgataattacaagctcacggtagacagtaaatatcaagatccattgaatgatattgttgccaacggttcgtccgtcaagaaaaagacggaaacggaagacgcgctgaataatctgattgcctctgcgacttttgagaaaactgatgacggatatggctactacgcatactcagccgtcatcgaaaacatcagcggaatcgatttcggtaccgtcaacttgatattggctctatacgatgccgatggcgtgaaggctgccgaagtatacgccagtactaatgcttggcctgcaggagaaaaggtaaaattcgaaaccggtagcgatgccgatgcggcgcaggtgaaggcatctgtcgaccactatgaagtagacgattaagcgtatccatacacaacagatagtgatggcccacagggaatcttcctgtgggccatcactattaaacgtcaatatcagtcaacttacgccgagaactgtttgccgaattccgagaagagctggcggcgggcgaagacgagcaggccgagcagcaccagcagggagaccagcccgctgaccatcaccagcacatcccacggagcccagccgagcggaatgaacgtcagcggcagtaggccagcgacgatgtcgaatgccagatatttggcgtattggtcgatggccttggcccgcagcacgataagcagtaccacgtcgaagacaagtgagaccagacacatgatgggaatgacaaacatcgtgacgatatggctccccgtggccgcgaaccatatcagtgcaatcgccagcatgatatagaaatagcggaacatgatacgcagaggtcgtggtacgtgcagaatcgcactgttgatgaacagtacgctgatgatcagcgcagccgccgaagcgctggcaatcggtatcggccacgaaaacaggtagctgaagaagccgtgcagcaataggatcgcgccggtcacgaacgtgatgatcttcaccgccaaacgccttgggcgcaagtagatctgctgtgtggggaacgtggcgggagaggcctcgccgtgcaattcgttctggcacagcgggcaacggaccatatcgccggtgaaatcaacgttgcaggcgtcacaatgcttcatgccgacgctcccttctccacatgcactccggcgatgctcatacggccgctgatgccctgcgtggcgaggatccggcacagattcttgatgacgttcagatcatggtagatggtggagatgccgatactcaggtcgtcgccgaacgagcagaccgtgaaattcaggctggccggtgtggtgaggaagctcaccgaacgcacatggcgcgcgagtcgttcatccaaggtgactcggccaaggttcgagacggtggtcgtggtctcgcggtcggcgatgaaccgggccagctccagcacccagtccttggcaggggagggcgcgagacgcagcgccggattcttttccagcgcaatcatgcggttcatatgcgatttgacgcgctcgcgactggtggcatggccgagctgctcctgcacatggcgggcgatgtcggccaacggctcatcggtcagcaatccacccataccgttgccgtgcgcggtgcgggtggcggactgccgatcgtcgccggtcgcgtctgggctcgttgcggaagttttcgcggagtcctcatcggcttcgatatcggccggcgtgtacgccacgtaagtcatgccgtagaagttgcgcacggtctccgacttgaagaaggcgcgcaagtcgaccggaatatccacgcgaatcgcgcgattgcgggcgcgcgagggcatgacgtcgcgaatcgcgcacagtatcgcggcgatgaggtaggaggtgaggctcactccgcactgatgtgctgcaccaagcaccttgctggcgctgacgtgatattccatgaacgtgggcgcggcccggtcgatggggccggccagccggtagatcttcgtgcctggcgcggcgccggctttgtcccgttcgtaatatttgtcgaagctgttttcggctttgtcgctgtccgagccgtcgtaatccgaaggcacatccggcacgtcatatcgctcggcaatgtaggcgtgcaacagtgacttgaacaggttgatggcgccgcgaccgtccgaaatgatgtgcgagacctcgagattgacacgattgcggaaataactcacgcggaacagcatgcttttgggcccgtaatgcagtcgcgagcatatcggcagatgttccggctccactcgaggcttatcatccgactgttcgaggtaatgccagaacatgccgttgagcaggtgcacgttgaagctcgggaaccgggcgatggcatggtcgagcgcgtgctgcaggatgtccggggcgatgtcgtccgccagctcggccgaatagcggaacacggtctgcgaggagcggccagcctgggaggagtagaacttgccgatgttgtctaatcggtaccaagtacgtcttgccacgcgtcgcctccctccggtgcgttggcggtggtgccggtgccgggagctggttccagcggtgtgccgtcgaggaaatgctcgatgatccggtaagtggtggacaccagccctacggccgacgtgttgagcagataaccgtggatgccgtcgtgaatccggtaacaggagacgttgtcgttcaccaattgcagacgacgggcgtacgcctcgtcctcgtctctgagcgggcagtattcggcggacaacaccagcgtgcgcggttgattgctcaggtcatgcgcggtgagcggcgcgaaatacggattggtcaggtcggccacggacgaacggtacatgtcgatgtagtcggccatgtcctgtgcggtgaggatgtagtcggtgccgttggtccgcaccgattcgaacggactggtctccgggttgtagtcgttgccgactaccgggtaaagcagcatctgcgtgcgcggcatgaactcgccgcggtcgcgggccatgagcgagacggcggccgcaagattgccgcccgcgctgtcgccaaacagcacgatgctgtcgggatcgggagcggggtcagacatatcgcccccgctggcgggaatgtctctctggtccgcaggaatatcgctcccgccggcaggggctgtcggcaaagccgactgggggtggccatcagcggcagaacctccacccaccccagaaatcggcaactccccggcaaacaactgccgggccgcctcatagcaatcctcaacggcagtagggaagcggtattcaggagccagccggtactcgaccgcaatcacacggcgctgcaatcgcacggccatatgcgcgcaagcctgcgtgtacaggttgatgccgcccgtggcccaaccgccgccgtggaaaaacaggatagtgccatgtggcgtaatcacggggatttccgtgccggagtcgtcgggaatgctgccggtgttgccgctcgacgtgctttccttgatgggtattttgggtaggactttgggtaatacggcgggcagaatcgcggatattgccgaggccactggcgtgtcattggcggaagattcctccagggcttcgggcaggggcgctccataggcgaccagcggcgtgaacactcgcaatggtacggcatatccatccgccataggcgccgaaatatcctcgacacggcatttcggattggcgggtgcctgcttggcgataagctcttccgccacgcgctgcaatttgtacgacttgcccgcgttgggcttgatgtagctggcggccttcatcgcggcgaacaatgcctcgttgatcggcatgacgacaggtcctttcagcggcggattcggtagtgcgaacaccccaaccttagcccatgaccggcatgaacaaaaaagggaaggaacccgagagttccttccctgtgtgccgtatcagacgagatacgcgccgattatcaggcggcgaagtactccacgccggcctcgaagatcggctggtacttgttgccgggcacgttgacgtacaggccgttgccggaacgctccgagtggcccatcttgccgaacacgcggccgtccgggctggtgatgccctcgatggccagcagcgagccgttcgggttcacgtccagatccatgccgggggtgccggcctcatccacgtactgcgtggcaatctggccgttggccttgagctgggcgagcacctcgtcggaggccacaaagcgtccctcgccgtgggagatggccacggtgtggatgtctccgaccgaagtcttggccagccacggggagagatcggaggccacgcgcgtgcggaccagtcggctctgatggcggccaatggtgttgaaggtcagcgtcgggcaggcgtcggtcatcggcacgatgtcgccgtacggcaccagacccagcttgacgagcgcctggaaaccgttgcagatgccgagcatcaggccatcgcggttcttcagcaggtcacgtacggcctcggtgacggccggcgcgcggaagaacgcggtgatgaacttggcggaaccgtccggttcgtcgccgccggagaagccgccaggaatcatcacaatctggctcttgttgatttcctcgaccagtgcctgcgtggattcggcgacggcggccggcgtcagattgttgacaatcagcgtggtcacgtcggcaccggcgcgctcgaaggcggcggcggaatcgtactcgcagttgttgcccgggaacaccgggatcaccacgtgcggcttggcaacggaagaacctgtgtacgcggtcttcttcggtgcgtggaagtcgatggtctcgacggtcttgcccttatcctcgcccttggagcggtatgggaacacggattcgatgccggactcccaagcttcctgcacggcgttcaagtccagcgtctcaccggcggccttgaacgcgtattcagaggtggtggtgccgatttcgccgatttcgaccaggttggagacggccggaagcttggcgttgtctgccagctcgacgatgaacgagccgtatgccggggtgaacaggtcatccacggcgatgctgtcgttcagggtcacgccaatacggttgccgagcgtcatcttgaacagggcttcggcggtggcgccatagcccggcgtggagacggccaaggcatcgtggaagtcggtgagctcctcgatcacggagaacacctcaagcagcgcgtccttgtccggagtcaggccgtcggccaggtaacgcggtgcgatacgcacaatacggtggtcggcacccttgaactcgggggaggtggcgcgcttcatgttgcccacggccacggcgaaggaaatcagcgttggcggcacgtcgagatcctcgaacgagccggacatggagtccttaccgccgatagcaccggcgcccagatcaacttgggccatcagcgcaccgagcacggcggccgtcggcttgccccagcgttccggctcgtcgcgcagcttctcgaagtactcctggaagctcaggtaggccttctcatgctcgaagcctgccgcgaccagcttggccagcgactcgaccacagacaggtatgcaccggtgaactggttcttggacataatgtatgggttgaagccccacgccatagccgaagcggtggtggtctcgccgaacaccggcagcttggcgaccatggccatgttcggggtgagctgacgcttgccgccgaacggcataagcacggtgcccgcgccgatggtggagtcgaagcgctccgacagacccttgttggaggccacgttgagatcggtgaccatcttgttcatgcgctcggccaacgtgccctcgccccacggggtcccgtagccctgctgggcttcgacgtgcacggtctggtgcttggaggcaccgttggaggccaggaattcacgggacaggttcacgatttcgtcgccgttccaggtcatcaccatgcacggatcctcggtcacagtggcaatcaccgtggcttcgaggttctcttcgcgagcgtaggtgaggaactcgtccacgtcctcggcggccacgtccacggccatacgctcctgagattcggagatggccagttcggtgccgtccaggccctcgtacttcttgggcacggtgttgaggtccacgaacaggccgtcagccagctcgccgaccgccacggacactccgcccgcgccaaagtcgttgcagcgcttgatcagacggcaggcatcgccgcggcggaacagacgctgcaacttgcgctccacaggagcgttgcccttctgtacctcagcgccgtcgagttccagggactctacattgtgagccttggaagcaccggtagcaccgccgataccgtcacgaccggtacgaccgcccagcaggatgatcttgtcgccgggggccggggtctcgcggcgcacgtggtcggccggggtggcggctacgaccgcacccacctccatgcgcttggccacgtaaccggggtggtagatctcatcgacctggccggtggccagaccgatctggttgccataggagctgtagccggcggcagcggtggtcacgagcttgcgctggggtagcttgccctcgagcgtctcggacaccggcacggtcgggtctgcggcgccggtgacgcgcatcgcctgatacacgtaggaacggccggacagaggatcgcggatgcagccgccgatgcaggtggccgcgccgccgaacggttcgatttcggtggggtggttgtgggtctcgttcttgaacaggaacagccagtcctgattctcgccgttcacatcaaccttgaccttgacggtgcaggcgttgatttcctcggactcatcgagaccggtcaggatgccgttcttcttgagccatttggcaccgatagtgcccatgtccatgaggcagacgggtttggcatcacggccgagctcgtggcgcatctcaaggtagcgctcgaatgcggccttgacggtggcgtcgtcaatatccacttcgtccagctcagtgccgaacgtggtgtggcggcagtggtcggaccagtaggtgtcgatcaccttgatctcagtgatggtgggctcgcggccctcctcgctgaagtacttctggcagaattcgaggtcggccaggtccatggccaaaccgcgctcgtcaatgaacttctggccggcttcggcgtccatctcgttgaaaccggcgatggtctcgaccttgccgggcaccggcacctgggtcttcagggtttccttggtctccaggctggcctcgcgggcctcgaccgggttgatcacgtaatgcttgatggtgtccacgtcggcgtcggtcagttcgccttccagcgcgtacagcttggcggagcggaccgtcggacgctcgccctgggagatgagctggatgcattcggcggcggagtcggcgcgctggtcgaactggccgggcaggaactcggtggcgaagaccttggcgccggcgaagtcgggcaggtcgtaggccacattgtccacctgaggctcgctgaacacggtgggcacggtctggtcgaacagctcctgggagatgccttcgacgtcgtagcggttcacgatgcgcagggccttgaggccggtcagtccgaggatcgtgcgcagttcgcccgcaagctgctgggcttcgacatcaaagccgggcttcttttccacgtacacgcgaaaaaccatggaaatcctttcttgaaattattgaaaaattgaagaagtgcggtaaaagaacttggctcccctctctgaggggagctgtcagcgaagctgactgaggggagttgtcatggcggtgaacgtcttgacctcccctcagtcacctatcggcgacagctcccctcagagaggggagccagctatatgttctgctacctgcacctaaacgacttactcggcgacttcgatgccttcggacttggcgagctcggccagacgttcctcgatctcctcgtaggccgggatgatgctgcccagaccacggcggaacaggtccttgtcgaggtgctcgaccttgccggagtggtccttctgatcccacagacggcaggaatccggggtgatttcgtcggccagcagcagcgtgccgtcggtggcgcgacccatctcaatcttgaagtcaaccagcttgacgtcgatcttggcgaagatctcgatcagggcctcgttgatcttacgagctagcggggcgatctcagccagatcctcacgggtgcacacgtcaagggccacgaggtcatcatcgttgacgaacggatcatgcagatcgtcgttcttcaggaagtactcgagcaccggctccttgagcggcaggccttcctccacgcccaagcgggagcagaagtgaccggcggccacgttacgcagcacgatctccaacgggaacatgttcaccttgcgtaccagctggccggtgtcattcacgcgcttgacgaggtggctgtcgatgccgcgcttcttgagcaggtcgaagatgatggtggtgatgaggttgttcagacggcccttgccggtgaagtcttccttcttctcaccatcgccagcagtggcggtgttcttgtattcgacccacagaacctcgggatcatcggttgcgtacagttgcttggccttgccctcgtagagcttttccagcttctccatgactcacctttcaggagtgaaatttctaggtgaactaacggtaaaagggtaccaatcgagggctacaacaacactcacggattacttcacggtaatagtcagcgcatcggccacgtgggcggccttggcgcgggcgtcggcttcggattcgccgacggccagtgccacggccatgcggcggtggccatgcacttcgggcttggcgaaaatacgcagatcagtgctgggctcggccagtgcggcggccacgtcggtgaattcggcttcgccatcgccggccaccacgatggcgtggctggcagccaccgagccgctcggaattgtaagtgccacatgctcagcagtaatcggcagacctagaatcgcgcgagcgtgcagcgcgaactcgctcaggcgctgggaagccatcgtcaccatgccagtatcgtgcgggcggggagaaacctcgttgaacagaatcgaaccatcggtgagcacgaacagttccacgccgaacacgccccaaccggtttcaccggctgcctgtgccttggccaccaagccttcaacgacggtgcgtgcaatgtcttgagcccgctcagattcgccgcctggctcagcggccggctgccaagactctcgataatcgccggactcctgacgctgaccaatcggcgcgcatgtcacaataccggcggacgaagaaacagtcagtaccgtcaactcacgttccaatggggccaacgcttccacgattacgcgcgacacatcaccttcatcggcggcacggcggccttcctgagcctcggtccaagcggcatcgatggcattggcggaacgtaccaccgactgaccgtgaccagacgagctcatcaccggcttgactacgcatggatagccaacttccaaagccccggcgcgcagctcttccaacgaaccagcgaaacgatacggcgtggtcggcaagcccagctcctcgtgagccagcacgcgtaggcgttcgcgatccatgcagatcgcagcaatctcggcacttggcactacttgggcaccggcagctgcagctccggccaacacgtcggtggcgatggcctccacttcgggcacgatgatgtccggcttgacttcatcgaacaacacctgcaactcggcggcattcgccatatccagcacgcgatattcatgcgccacttgctgggctggagcaccggcataggagtcggctgcgcacacccatgcgcccagccgcatcagctcaatggccacttccttgcctagctcgcctgcacctagaaacagcacgcgggtgggatgtttgcccagcggtgtgccgagcgggcggttcacggcaggaattgcgggggagggggaagtcacggcagtattcacggcgttctcagtcatacccacattctgccatgctgcatggaataggcgagcgctccacggtgcggtgaatggcccacggtgcagtgaaatccgcacggtgcagtaatgcaaaatggcttaattccgcagtttgctaaaatcgtgttaccgcacggtgcgttttttaccgcatggtgtgacgtttaccacatgatggggttgcgattcaggacagaaagcacattcccatggaggtttcaccgtcccaaggaataatgggaactttggccgcctgagggaagcctgagagtggtcgatacagcaccgcatgccattgaaaaagttgtcctgcccgtaacctgccataaatactgcgtatagacacgccattgcgcgcgtaacagagctgccgtaccttagcaatcaccggccgatgaggtttgtagtacggtcgggccaacgttttggggatgacggcggtgttccaaaaccagtacgccgctggctggatacaggggaggccggcataccgatgtcgaacgcggctttgatttctcagcgggcggcagggttgccgggcaatccttttgccgaggcggatgcccgagctgcagcagccatcgccgccggcgaagatgtcatcgacttaagcaaaggcaatccggatggtcagccacctgcatttgtgcaggatgcgctcgctcatgccgcccatgatccttccctgtttcgctatccgtcatttgatggtttgccggaatacctgaatgctattgccggttggtacgagagcaagcacggtgtctccgtggacccggccactcaactgctggcgacttccggctcgtcagtaggcattgccactgttattcaggcgcttatcgatccaggtgagacggttgttgctgtcaatccttattacccgcaatatgaaggttccacggcggttgccggaggtcgattcgagacgattcccgccgatccggcgcgtggtttcctgcctgatttggatgctgttgatccggctgtgtgggaacgtgcgaagctgctgattctcaactatcccaacaatccgaccggcgctgtggccgcgccggaactgtatgaaaccgctgtacgcctagctcggcagtatgggttcatcgtgcttaatgattttgcctatgctgggcttgaattcggaagtacgcgctcgctgagcctattggagacacccggtgcgcttgatgtggctctggaacttgggtcactctccaaaatgtatatggtggccggctggcgcggtggatttgtggctgggaatgcagaagtgttggctgaggtcaaggccgtgcacaggcagaccgcggtactggcgtccagcgtcatccagcaggccggtgcagtggcattggaatccgatcagagcactgtggcggcgctcgccgtgcaataccagcatcgcttcgaagtggtgcgagacggttttacccaagccggcctgccggtatctgaagcgcaaggtggactgttcgcatgggccaaagtacctgagcggtggggcagcgcgggcgtgcacgatggcacagtgagtgaggttagggttgcggatggctcggcagacttggcaaatgattccgcggcattcgtggattggttgctgaagaccgcgggtgtcgcattgatgccgggctcgtgcttcggcaaagcaggcgaaggctgggtgcgtatcagtttgctcaaacacaccgctgatttgtttcaggctgcagcgcgggtttcgagggctctgcaagacaagtgattactattcctgtagtgcggcaacgataggtcaccttattgggcaaacgtcgctgagccataccatttcctattggtccggactcggccgccagatgtgacggctacgatgaagcaatgcgcgaaaacgggattgaaaagagcattgaccgcccgctgaccatcgctctggtggtggataccgtgggcaaccagggcaatggcacgtccaattcggccttgcagtgggctgctgaattggagagacaagggcatcatgtgcggctcgtaggtgttggcgcccctgaatatcccgcacgagtgaacaaggttccgctcgtttcctgggtagcggctaaacagctcatgcagttcgccgagcccagtgacacgttgttccgcaccgcgttccaaggtgtggatgtggtgcatgtctatatgccgttcaagttcggccgtcgtgccgcaaaggtcgcccaccaaatgggtattccggtcactgccggattccatctgcagcctgaaaacgtgctgtattccgccggtccgttacgccatattcccggcatctccagcttcctgtactggttattcaaacattggctgtacaagcgcatcgatcatattcatgtgcccaccgagatgaccgccagcttgctacgcgcgcacggatacaaggcgaaactgcatgtgatttccaacggttattcgcctgtctactcacccaagaagccggttgatcctgaggcgtccgctccggtaccgttccgcgttattgcgtccggcaggctcgccagcgagaaagatcagattacgctgattaaggcagtttcgatgtcgaagcatgctgggggcattcagctcatcatcgccggtaccgggccgctcaaacagtatctcaggttccgtgccggtcgtttgctggcacgcaaggccgacatcggctttcacaagcatgccgatatgccggatctgctgcgttcgggcgatctgttcgtgcactgttcgattgccgacatcgaatcggtgagtgtaattgaggcgatggcttgcggcttggtaccggtgattgccgcgtccgaattatcggcggccagccagtttgcgctgctggacgaatcgttgttcccggtgcagaatgcggcgatgctggcacggcgtatcgattggtggatcgaacatcaggttgagcgtgcagaatggggtgagaagtacgccgaatacaccaagtcgcactattccgtggaagcctcggttcacaagttcgtggacatggaacgcgaagccataggggagtaggttcgttttgaccggggtctctccctcagtccgccttcagcggccagctccctcgtcagagggagcttaaaaatctccctctgacgagggagctggcatcgcgaagtgatggcggagggagagacctggagctcaacggtcacagcaactcaataagctggtcgacctcttcgggcgtggtggcccagctcgtgcagatgcgcatcacggtatgcgtatcatcagccttttcagtgaatccaagtttcacgtcatgttcgagccggtcgatggtcggctggtccatcgtcacgaagacctgattggtcggtgcttcgaaggtgagcgtgtatcccttggcgtgcagtgcctcacgaatgcggtcggccgcctcattggcattgcgggcgatcttgaagtacaagtcgtcagtgaatagtgcatcgaactgcgcacccagcacgaagcccttggccagcagcgcgccatgctgcttgatacgggtcaggaaatgcttcggcgtgttgtgcttggtgaacacaatagcctcgccaaacagggcacctaccttggtgccgccgatatagaacacatcggcgatgtttgccatatcttccagcgtcatatcgctgccggtgacggtcagtgcatagccaagacgtgcgccgtccacgaacagcggcatgtcgtacgtatgcgccacgtcggcaatggcctgcaattcggccttggagtagatggtgccgtattcggtgctttgcgagacgtatacggaaccggggaacaccatgtgctcgtagttgccgtccgcatagaaggtcttgcagaattcgtccaattcggccggatccatcttgccgttgtggtggggaatcgtgagtaccttatggccggagaactcgatggcgccggcctcatgcacgttcggatggccggacgcgaccgtgatcacgcctgcatacgccggtgtgatggtatcgatgacgacctggttggtctgtgtgccacctaccaggaaccacacgtccgcatccggctggccgcaagcctcgcgaatcttcgccttggcctgttcggtaagctcgtcggagccataacccgaatacagatgattgttggcttcggccacggcctccagtacggcagggtgggcagcgcgggagtaatcgttctcaaaagacagcatgatggacctttatgtccttgggtttggtgaagtggacagccccgagtgtacaacgtgggggtgcgcagaaaaaacaaaagacccttccatgaacggaagggtcttgctggggtggccaacgcggctcgaacgcgcgaccttctgaaccacaatcagatgctctaccaactgagctatggccaccatggtgtttgactcggcgcgcaaagcgctgaaccagcacaacaggtgaatactatacacaatcctgtggaaaatgtgcgtgccggtgtgttgcgattgtggttcatcgcgttctcgcccgtcgaagtcattgttcttttgcatctcatgccttgggcgtggacatgcgagcgttcacgatgcgaacagaattgtccattcttggtcaattccgtttagtttcttgcgatgttacttcaccaaacatagaagagagagacattatggagaaggtcaaggctttcgccgattggctgaccaaatggttcaccgtcatcgttatcgtgtgggccgtattcaactacttcgtgccggctgccagcctgtggggcaaggcatacaccggttacatgctgggtattgtgttgttcggcatgggcctgacgctgacgctggatgacttcaagcgcattctcactcagccgctgatggtcatcgtcggtaccattgcccacttcatcatcatgccgcttatcgctgtggccctgtgcgccatcttccacctgtccggtccgctggccgtcggcgtgattctggttggctgctgcccgtccggtacctcctccaacgtgatgagctacctctcccgcggtgacgtggcgctcgatgtctccatcggtatcctttccaccctgtgcgctccgttcatgattccgctgctgatgcagctgctggcctcccagtacgtgtccgtgccggtcgagtccctgttcctcaacgccgtcaaggtggtgctcttcccgatcgccctcggtgtgatctgccacatgatcttcggcaagaagatcgaaaagattaccgtggccctgccgatcgtctcccaggtggccatcctgctgatcatcggcgtggtcgtcgccgccaacggcccgaagttgttcgtggccagctccctgatggccatcccggtggtcatcctgcacaatctgtgcggctactcgctgggcttcggcttctccaagctgatgtacaagatctacccgaagggcttccgctacgcacagcagaaggccatcaccttcgaagtcggcatgcaggattccgctctgggtgcaaccctggctctgacctcctttgcctccaacccgattgccgccgtgccgtccaccttcttctccgtgtggcacaacatctctggttccatcctgtccagctggtggcgcaaccacgatgacaagcacgaaatccactgggattccgacaatggcgagaagggctctgccaagaacgtcgcgaccggtgaccacccgttcgatgctgacaagaaggcaaccgctgatgccaaggtcgaaggctgattttctcagctgaaaaccgactgcgcaataaccgctcccacctactcccgattactgttttgggcgtttcgcaggggcggttttgctatactataagtgaggaaacggcaaggtgatacggcaaagaggccgggccgcaaatggatgttcccattggatatggaagagcacatggacgtgctagataacacagttggtatgtggtgaatgatggatagctgaacctccttggcggtgcccccgtgcgacatagtctccgcgggggcacctgctgtgtgaggcagagtgtggggcaaatactctccggcgcgtcgttgtccggcgaaatcgtagtattgatatttgtgtgtgccaacggcatgccttatgtaataggtgtgcgcgctgggatatccttcaaaccgctgatcgcacgcagcaatgcgccgacgggaggggagaaggccatcgggccggtggactgggctatcttttccgattcgtcggatgccgtcagcagacgagcgtccggagagctgagaagtgtggcgcagggcggcggtcacacgaaagcaagagaaaccactgaatcggagaattcaagttgcctactattgaacagctcgtccgtaagggacgtcaggcaaagccgaagaagtccaagactttggccctgaagggaagcccgctgcgtcgtggcgtgtgcacccgtgtttacaccaccaccccgaagaagccgaactcggctctgcgtaaggtcgcccgtgtgcgcctgtcctcgggcatcgaagtcaccgcctacattccgggcgagggccacaacctgcaggagcactccatcgtgctcgtgcgcggcggccgtgtgaaggatctgccgggtgtgcgttaccacatcgtgcgtggtgcgctcgatacccagggtgtcaaggaccgtaagcagggtcgttccctgtatggagcaaagaaggcgaagtaagagatatgtcacgtaagggaccttccaagaagcacgtcgtgctgcccgatccgatctacggttccaccgtggtggcgcagctcatcaacaagattctgcttgacggcaagaagtcgatcgccgaggacatcgtgtactccgcgctcgatatggtcaaggagaagtccgaccaggagccggtggctgtgctcaagcgcgccctggacaacatccgtccgtccctcgaggttcgctcccgccgtgtcggtggcgctacctaccaggtgccggtcgaggtcaagccgaaccgcgccaacaccctgtcgctgcgctggctgaccgatttctcccgcgcccgtcgtgagaagaccatggccgagcgtctcgccaacgagatcctcgatgcctccaacggtctcggcgcttccgtcaagcgtcgcgaggacacccacaagatggctgaggccaacaaggccttcgctcactaccgctggtagtcttaagccccctaagaaagctaaggaaaaacgatggctgaagagatttcggacctccacgacgtccgcaatatcggcatcatggcccacatcgatgccggcaagaccaccactaccgagcgtattctgttctacaccggtaagaactacaagatcggcgagacccacgacggcgcctccaccatggacttcatggcgcaggagcaggaacgtggtatcaccatccagtccgctgctaccacctgcttctggagccgtcagtcccacgacaccaagggcaagttccagatcaacatcatcgatacccctggccacgtggacttcacggccgaggtggagcgctccctgcgtgtgctcgatggcgccgttgccgtgttcgacggcaaggaaggcgtggagccgcagtccgagaccgtgtggcgtcaggctgacaagtacggcgttccgcgtatctgtttcatcaacaagatggacaagctcggcgcgaacttctactactccgtcgacaccatcaaggagaagctgggcgctactccgattgtgatgcagctgccgatcggttccgagaacgacttcactggcgttgtcgacctggttgagatgcaggcctacgtgtggaacggcaccgaggagctcggcgccaagtacgacaccaccgagatcccggacgacctcaaggacaaggccgaggaataccacgagaagctcgtggaagccgctgccgaagccgacgacgagctcatgaacaagttcttcgaggatggcgacctgtccaaggaagacatccgcgctggcgtgcgcaagctcaccatcgccaaggaagccttcccgatcttctgcggttccgccttcaaggacaagggcgttcagcctatgctggacggcgtcgtcgattacctgccgtccccggaggacgtgccggccatcaagggctacaagcctggcgatgagtccgtcgagatcgaccgcaagccggtcaagaccgatccgttctcggctctggtcttcaagatctccacccacccgttctacggcaagctcgtgttcgtgcgtgtgtactccggttccgtcaagcccggcgattccgtgctcgactccacccgtgagaagaaggaacgtatcggcaagatcttccagatgcacgccgataaggaaaacccgatggagcaggctgacgccggcaacatctacaccttcgtgggcctcaagaacgtcaccaccggcgacaccctgtgcgccatcgacgatccgatcaccctcgactccatgaccttcccggatcctgtgatccaggtggccgtcgagccgaagaccaaggccgaccaggagaagatgggcatcgccctgtccaagctggccgaagaggatccgaccttccaggtcacgaccgacgaagagtccggccagaccctgatcgccggcatgggcgagctccagctcgacatcatcgtcgaccgtatgcgtcgcgagttcaaggtggagtgcaaccagggcaagccgcaggttgcttaccgcgagaccatccgcaaggccgtcatggaccagggctacacccacaagaagcagaccggtggttccggccagttcgcaaaggtcctgatgaacttcgagccgctcgacaccaccgagggcaagaccttcgagttcgagaacaaggtcaccggcggccacatctccggcgaattcatcggccccatcgaggctggtgtcaaggaggccatggagtccggtatcctcgccggcttcccggtcgtgggcgtcaaggccaccgtcaccgatggtcagatgcacccggtcgattcctccgaaatggccttcaagctcgcaggttccatgtgcttcaaggaagctgccccgaaggctaagccggtcatcctcgaaccgatcatgaaggtcgaagttcgtacgccggaagagtacatgggcgatgtcatcggcgatctgaaccagcgtcgtggcaacatccagtccatgaccgacggtgtcggcgtcaaggtcatcgacgccaaggtcccgctgtccgagatgttcggctacatcggcgacctgcgttccaagacccagggccgcgccatgttcaccatggagatggactcctacgacgaggtgccgaagagcgtctccgaggagatcatcaaggctcagcgcggcgagtgacacgcgcctcacgatgaagtagccagtgtcgccagtcagcggtaacattctgtaccgctgactgggttctggctcttcaaagtggcacataacccagaaacccagtagaatagagcgagtgcctgcgcgaaagggtgcaggaaactcacgagacgtccaggaggacaaaagtaatggcaaaggaaaagtacgagcgtactaagccgcacgttaacattggtaccatcggccacgtcgatcacggtaagactaccctgactgctgccatctccaaggtgctgcacgaggagttcccggatgtcaacccggagtacgacttcaaccagatcgattctgctccggaagaggccgcccgcggtatcaccatcaacatcgcccacatcgagtaccagaccgagaagcgtcactacgctcacgtcgactgcccgggccacgccgacttcgtgaagaacatgatcaccggtgctgcccagatggatggcgccatcctcgttgtggccgccaccgacggcccgatggctcagacccgcgagcacgtgctgctcgctcgtcaggtgggcgtcccgaagatccttgtcgccctgaacaagtgcgacatggttgaggatgaggagctcatcgagctcgtcgaagaagaggtccgcgacctcctcgacgagaacggtttcgaccgcgactgcccggtcatccacacctccgcttacggtgctctgcacgacgacgctccggaccacgagaagtgggtccagtccgttaaggacctcatggacgccgtcgacgactacatcccgaccccggtccacgacctcgacaagccgttcctgatgccgatcgaggacgtcttcaccatctccggccgtggtaccgttgtcaccggtcgtgttgagcgtggccagctggccgtcaacactccggtcgagatcgttggtatccgtccgacccagaccaccaccgtcacctccatcgagaccttccacaagaccatggacgcctgcgaggctggcgacaacaccggtctgctgctgcgtggtcttggccgtgaagatgtcgagcgtggccaggttgtggccaagccgggctccgtcaccccgcacaccaagttcgagggcgaagtctacgtgctgaccaaggacgagggcggccgtcactcgccgttcttctccaactaccgtccgcagttctacttccgcaccaccgacgtcaccggtgtcatcgagctgccggaaggcgtcgagatggttcagccgggcgaccacgctaccttcaccgttgagctgattcagcccatcgctatggaggaaggcctgaccttcgctgtgcgtgaaggtggccacaccgttggctccggtcgtgtgaccaagatcctcgcctgattttcatcagacaagaatcttcgcttgaactagcgttataggaaatccccttcgaggaaactcggaggggatttcctataaccgcagcaggatatggatatgtaccacgacttccggcctggatgcgctagtgttgctttccaatagataaacggactgctgcactgcgagggtatgacactgatggcaggccgggaaagaaggtcgatgatgactggtgcacaggctgctcactgtggttccgtatccgcaatttcactgggactgcctgtttccacggcgattccggaggccaagggcatattgccgaaggctctgttcgtgggcaaagcgccgatttccggcaagcttaagcagcggtttgtgaatgagattgaatccatcaccatgctggccctggctcgttctgccaacactggacttgcggatggcagactgattccagaagtgttgattatcggtcttaaacttacggctaaagccactgaaataccttctgaagtcatcgaacttattgccggacaacgcaagtcgggcattgtgtttgcatgtgtgcgcgaggtgccgttcgaaggcagaacgcgcgaggaatgcgcgttcgcggtgcgtcgtgcacagccggggcgtgccggacacacgcttatttatcacgtgtatgcaggcggctggcatccggcaggggagtgccagcttgagttgaccggctccaccattgatgaactgtgggcttccttgtgctcgcaagcgattttgggaaccacggacttcgagaatctggatgcacgcatcgtgcagcatggcgagatcgcgcgactcgaagccgatgttgacaaacttacgcgagatcatcagcgtgctaagaatccggcacagcgtaacgaaatttacgccaaactccacaaggcaaagacgcaattagcgcagatgcgcgaagcataaggcgttacagttgaaccatgttcccattgcttgagaccctggtcgccgtatatgaggtgggccagttcacgttggctgctgacgagctgaaagtgtcgcagtcgacggtgtcgtcgcgcatcgcccaattggaacagatggtcggggctccgctgttcgtgcgcaatgcgaaaagcgatgtgacacctacgcaggccgggcggatgctgtatcagactgccattggtattgatggattatggcgtgatacgcgcgagcagattgcccgcgtgcaggaggatcgcgagccattggcggtctcgttctcgcatacgaccgccgcaatattgcttcccaaggcattgccggtcatggcccggaacatggatgggttcgattttgccgtgcaggtgatgaactcggacgccattcttggccaagcaagcatgaaagccgtgcatttgggcgtggtggaaaagccgatcgtcaatgattcggtggatcgtgtcaccctgtgcgaggaccggctggtcttggcgggagaaccagacggtgtatggatggtgcgcgagcacggttccggtgtgcggtattacacggatttgtatttcaagaccatgcagggtttgccgcctcgcaccatggaggtgtccagcaatgccgcgattgcggcggcgttgtcttccggctttgggcagtcgctgatttcggaagccgcagtgccttctggagtgccggcgcgaaagctcggagacgaattcgtgcgccgtttctatgccttggtgccgagatccggcctgacgcacgatcagcgagagctggtggaagcgattatcgctgtgttgcacggatagtcagtgccttgtctcccgtcagaggggagccagaatgtggtatcggcaaaatcgatgatatgtattggtagcaatgatttgaccgatgtaaacgcttgagattcaatagacaccatgagagagttctgtacaaaatggtggaagcgcattgccgccgttgacatgttgttcattggcgttctgactctgctggcttcgctgttcgcctcctggctcaagcagttccccggattcagcctgttcggcgcgcttatcatcgcgctgctcatcggtatgatcatccagttcccgatccgcagtgcctacgtcggttccaatgatggccgcaaggcaggcgtcaaggacgccgctggcctgatttccaacaagctgctgcgcctcggcatcatcctgctcggtttcaagctcaacctcgccgtgctgttcacgcagggcatcaagtgtctgccgatcgccgctgtggtcgtcacgctgaccatcatcgtgtgctatgccatcgcccgcaagctcggtgtcgacccgatgctcgccatcctgaccgccggtggcaccggcatctgcggtgcggccgccgtcatgggtctggccggttccatcaaggtgtctgaggacaagcaggacgagaaggacaacgacgtgaccatggccgtggccatcgtagccattatgggtactgtgttcgcgttgctggagatcgcgctcggcccgctgaccggcatgaccaaggatcagctgggcatcaccgccggtgcttccctgcacgaaatcgcccacgcggtcgccgccggcgacgctttcggcgcggtggacatcgccaccatcatgaagctctcccgcgtgctcatgctcgtgttcgccgccatcattatcgctatctggtgggagaagaagcactctgaggtggagaacaccggcaagaagaccgtggccttcccgtggttcatgctcggctttatcggcgcttcgatcatcggcactttcgtgccgttcattgccttcatcaccccgcagctcgtggacttcgcgtacatcgtgctcggcatggccatggccgcgctcggcatcaacgtgaacttcaaggccattgcttccaagggtaagaagccgatgctcgccagcttcctgacctcgattctgctcatgtgctttgcggcaggcgtcgcggtgctgttcttctgattgataagtctttgaaatacaaaggcgacatatggctttgagccatatgtcgcctttgtattgttgcgatatgggatgtgcaatcagtcggcgcgatggtaggtgcgctggctgagaccgctgttgcggtgattgccgcgggtgctctgtccggtctccgaggaaatcacacgctgtgcgccgatgatggcgaatgccaagggcggcggccgaagcgaccaccgcgtcatgcatcatcgcatggcgcagcagcgtggcttcgaggaacagcgcgatgcccagtggaatgatcaggaagccggtgaacttggtgaccttgcgcatcgagtcgagcagttcggagtggacgcgcttctcctgacgtacctcgttgaccagtgaggtggcgtagttgtcggcacccacgtgggtcacgcgcgcgtagcagcggccagaaatcgccgatgagccggagaacaattcggcaccggcggttttggtgatggaggcgctttcgccggtcaacagtgattcattgacttccagagagcctgcgatgaccacggaatcattgcagatttgcttgcctgcgtcgagcacgatgacatcgtccttgacgatgccggatgcctcgatttccgattccacgccgtcgcgcagcaccacggcttttgctggttcaggatggtcagctcgtccacgaacttcttggccttgagctcctgcgcgatgccgatgacgatgttcaggatgatgataccgctgaccgcgtcgggaatcggcgtggcggtcagacgagaaaaccgcaggccgcagcaacgaccggcacactcagcgacagcaccagataggccgctgcggtggggtagcggtgtttgcggaagagcatcaccatttcgttgattgcggtcgagaacgtggagaagccgccgaggaaaccggtggccagcactagccgccatggttcatcaagtgtcccgccgagggccagcgccgcgaccaaaccggctaggaatccggcgatgagattgatggtgaacgtggaaagtgggaatgcgcgccgccagtacgttttgatggtcacgtcaagcagatagcggcaggaggcgcctacgccaccgcacaggcagaccaagattggtaggaatacggtcatcacgccttacctcccttgctggtcgtagcggcattcgtatcagcggacgcttcggcggatacgttcgaggggccggccagatgcgttcctgcccacacgccggcagacgcacaaaccagacccagcgcgaacgtcaccagtagataggcaatgccggccgccacctgaccgtcgcggattgcggtaaaaccttccagcgcgagtgtcgacatcgtagacaaaccaccgcatacgcccatgccgagtccgcgactggcaagttctttggaacgtgcaccgaaccgggaagcgccggccaagtaagcggtcagccctgcatagcagaagcaagccagcatgttggccacaaacgtgccggtgtggaagctgccagccgcgggaatctgcgcgaacgcatagcgaatcgcggtgccaatagtaccgccgcagaagacgaccaacacaatatcaagatgaatatcggggagcttgcacgccgggggagtggtcgtgtgcgtaatcggccgggcgcctgcggatggggattgcgaacccatagtagcctttcctgaaaccgctgaatcctgctgaagacacaacgatttcatgcaatgtcaaatcgtgtgtaggaactatcagcagtgtgcggttcgaaacaagttcaggcgggtcccatcgccgaatcccagcctactcgtgcagaagacatccatgggcgtgtcgccgttttacttcaagtacttgaggtttttagagttgtcgatatgggcacaacgaccgcatggcatacgattcgcgaggcgtcgatgatttccgggcttccggagtccacgctgcgctactacgagcagatcggcattatcgctcccatcactcgcgacccgagttcggggcatcgcgcctattcggacgccgatctcgaacggctgaccacagtatcctgtctcgcagccacgggcatgccgctcgaatcgatgcgcacgtacctcgccaactcgcagggcgggcgagaaggtgcacgccgccagatggaactgctcgacgcgcaggccctgcgtctcgctgccaaagccgaatccattcgaatgcagcaggcgtacgtatcgttcaagacactgtactggcgggctaaggctgaggggcgcgacgaggaggcgcagcagctcatcgaagaaaaccggaacatcatcgaacaggtgaagcgcctgcaaaccgacgtcgaacaataaacgacaatagacagatattcccaacaaaggagtgatggacatgaccgaaatgatgaaagccgcgattttcgtggagcctggcaagatggccgtggaagaagtgccgaaggcgacgcttgaacaggatgatgacatcgtgatccgcgtggtgcgcacgtgcgtgtgtggctctgatttgtggttcttccgtgggctgagcggacaggccgcgcacagccaggtgggtcacgagtccatcggtgtggtcgaagaggttggcgcggcggtcgaatccgttaagccaggtgatttcgtggtcgtgccattcccgtacagctgcggcaagtgcccggtatgcaaggccggcttcgaatccgtgtgcccgcacggcggctacttctccgcttgtcaggccgaatacctgcgtgtgcctgaggcggacggcaccgtggtcaaggtgcccggttcaccggaagattattccgatgagcagctcgcatcgctgctgaccatttccgatgtgatgtccaccggttatcacgcggcggcttctgccgaggtcaagcccggtgacaccgccgtggtcatgggcgatggcgcagttggcctgtgcggtgtgattgccgccaagatgcgcggtgccacgcgcgttattgccatgagccgtcacgaggatcgcgcggcgctcgcccgcgaattcggtgcgactgatatcgtgcccgagcgcggccaagaagctattgacaaggtgctgggaatgaccggtggctatggtgcggacgcagttctcgaatgcgtgggctccaagcagtccttcgacacggcgattggcctgattcgccgcggtggcgtgattggtcgtgtgggcctgccgcacgacgtggagatcagcgccgaaggcacgttctacggcaacatcggcatcaagggcggcccggctcccgtgcgccactatgaccttgatgagggtctgctggacgcggtgctcaagggcgagatcaaccccggccgcgtgttcaccgccgagtacgacctcgaccatatccaggacgcctacgaggcgatggaccagcgcaaggtcatcaaggcgctgatccggttctagggtcaggtgcgcagagaacggttctcactaagaaccgtgtgagccattcgcacaaaaccgcacaatcgaacaggccgccggtgtgatgggggagagattgggggtgagccggttcggtgcgtttataccgttgttttcgtgtagaatcggccatctctatacttctgttttcgtgtagaatagcatatgcctatactgttgttttcgtgtaatgaggtgattgctcatgttgaagcgcaagatgctggataagctgatcgcatggaaacaaaaagcgggtgggcgtgaggctcttctcatcgaaggcgctcgccgtgtgggcaaaagcaccattgtgggttaagggtcaaaatgtgtgtctggctcggcgtgtcgcgggggttagatttggcctttttgaatgccgattgagtgggtgtagtcggtgtcgatagcgttgtcgtagagggctgggcgtcctgtttcgtggtcggcttggttctcggtttgggtcagggtggatactttggcgagttggccctggccccagtcggactgcctggcgattcgtactggatcgtcaggcagttccgtttttaagtagagccaccaatccagcatgcggcgttgtcgttcgcctgatctgccgcggtgggttctggcgagcagtttgagctgggcgttgatgccgccttctaagctgttggtggtggatttgatccgctcgggcgcaaggactcctgctggcgggttgaggtagacaaacagcatctcggaccgccaaagatggttgaggctgttgtaggccttgcgcacgttgtggtgggtccacacgcgggtccatgcacctgttttggggtctttgatcatggttttctcgttcatccattcccggtagatcgttgaaaactcgtgcagttgcacaccccacgcggcggcttcatccagtgtggtgatccgggtcagtttcagcgcaagtcggtagatggtgcgcccggcatcggtgcgtgggttggtggtggtgtagcggcggaccacgcgttgggcgtggacgaggcagcgttgaattttcgtagtcggccagcactttttgattgcgctgtatgcgccttggccgccgtcgatgacggcgatgagtggggcttcgatgcgttcaagcagcagttggtagtcgcgggtggtttcgtgtttgcaccagtgccaggcgatcacgtggtcgatggtcgccgcgacgatcaggcagccaccggcggtgtaggtgccatcgagaaatacctggtcgtagatccgcttgtggtggccggcggtggggtcaggcacatcaacgagccagcaccacttgaagcgccgcttcatggtggcgcggctaacaccgtttcgtttggctaggtcgtcgagtgatattgcggtggtgcaatgctcgatgaactgggtgaacactgccgcgttggtgatgtcgtttcgacgtttgacgctggaggcgccgcattgtttgcagcgccatctggtggtgcctttgctggtggtgccgttgcgtttcatttcaccgccgcagtggcagcgtggttggttcttcgacattgcgacaccacaccacgccgcgcatagcacatcacggctgccacaccgaggatttcccgtcgggggctagatatatgcttccggagcatatactttccggaaacctacaggtcaatccgtgaaaatccgcgattccggacacactttttgacccttaacccagattgcacgcgtggggattgagggtgtgaatcccactgtcgtgggtttgatgaggtagtcgatgttgcggaagctttggcatcggcgtgcgttgtgctccgtacgttgtttcaaaaacgggtttcatcaaacggaacaaaacctgggacacttcatatcccaccccaggcctaatgacttgggtgcagcggcaacgctcatccgatttaggcagagtcgttgcaggatccagtgggtcacctggtccgtggtctttgaattgtcgggcgcgcaggcaaggccagcacggaagatcttctgcaagcaacgcttgttggtgcaccggtagcgtggaaggcgcacatgaagttgttgggtggccgacgatgggcagatcgaccaggctgcggatgacgtggtcgcggaatactccaggctgcccgcaggtagggcattcattgatcggctcgacgggttcggcttcaataacagtgacgtcaccgttttctgtggcaccggtgatagtagttcctagttttgcggtgcggcagatggtatcgacgatgacatttccgttaggctgcacagtaggtccttagttttgtacggatggattagatacctttttcctacaaagccaaggaccccaatatcttgtgccacgcccgaacccccggcgaactaatcaatgcactctaaaaccggaagagcccttttagtactactggtggatttcggttttggtggggattaacgccgccggcttcggtttttccgttgaggaggtcgttgactacttcccgatggtgaaatgggtcgatggtgaggtagagaggaaccagtcacctggaagagatcgatccagtcgttggtgtgcaatctgggaggtagggtcgcggggtcgattcctcgcgagcgcaaccatgattgtgtttctgaacgtgatgaaaacaaccctgcccttcggagaatttcccctatcccgcgtccccgggcagtgaaaacggtgtgcaccatcgcctgaaaggctttgcgctgctctatcggaatcttcgggtcacccacccggcggatcactaagatccccccgtcaacgtttggctgtggccggaaagcagtccttggtacccgagaacccaggtgaaatgtgaaccatggggaccactgagccgtcatcatcgtgcttgcgcctaccccggcccggcggcgagcgacttcccactgcatgaggagtacagcgtcagtccatgctggcgcatgcagcaactttcgaagaatggcagtggtgaggtgaaagggaatgtttcccacaatgacgcagggagtggcgggtaaccggaagttaaggaaatcatcatggaccacttcgaccgccgccgaggaggtttcttgtgtgattttggcagctagttttgcgtccacttcaactgccgttatcgccctccccaagtgggccatcgggtgagtgagggcaccgcttcctggtccgatctcaatgatggggccggaggtttgtttcacaaggtcgatgatggagttgatgatcttgtggttggtgagaaaattttggccatgctcgtgacggccgtgtccgtatgcagacataaggtgtgctccttggatttgaaagggagccgggcatgacaaatagccgcccggctaaaggaccggagcggtttttaacctacggggtaggaaaccgccttagcggttggtgcgcaaccgcaaggaagcggtacctgaaatcaacatgggtctaattatatccatttaaagggttaagggtcaaaatgcgacgttcatcgtaatttttgagcgcgtgatcggggtttgttcctcataaagagtgagcgcgaaatccgcccggcggcgttggggttccgggatgcttgccttatggaaggcagactcgacatggccgcgaagaagcagctgacgaacaagttcaaagccgaatacgccaagggcacgaaaaagcagaagggcgaggtcctcgacaggctcgaggccgtgggcatgggcaggtccaccgcacgccgcctgctcacgcaggccgtcgcggccacaccgcgcgaacccgccaaacggggcaggaggccaaggtacgggcgggacgcgcagatgctgctggagcgcctgtggctgttgatgggcatgccgtgcggcccgtacatgaaggccatgttcgctcagtggatacccgccctgcaagccaacggcgaactcgaccgcgtcgacgacgcggccctggggcaggtgctgtcgatgagccccgccacgatcgaccgcagactgcgcaaactcaaggccgcgggggcgccgaagggcatgtccctgaccaggcccgcgcccgagcatgtgcgcaactcgatccgcatccgcaaatgcaccgacgagatcacacgcctgcccggcctggccgagaccgacaccgtcgcccactgcggggccagcgcccgcggcgagttcgcccgcaccctgacgatggtcgactacgcgaccaactggaccgtgaacgtgaccgcgcgcaacaacgccaagagcaacatccgggccgcggtcgagacggcaatccccctgttcccgttcccggtcacctgcttcgactcagacaacggcaccgagttcatcaacgacgaactgatcgactggctgcagcaaagggacatcgaacagacccgcagccgcccgtacaggaagaacgaccaggccacggtcgagtcgcgcaacaaccacgtcgtcaggaaatacgcgtcctactggcgctatgacacccaggagcaacgcgacctgctcaaccggctgtggacactcacccacgcgctgctgaacctgttcaccccgacccgcaagcccgtcagatgggagcaatcccgcgacggcaggcgcaagaccatatacgacgagccgcgcaccccgtgggctcgcgtattggaacacgacgccgccgaccgggcccggggaggccaaggatacgtggacgaagccacgcgcggacgcatcgagacgatcatcgcctcgaccaacccggcccagctcggccgcgacatcgccgccatccaggaccggctcgaacacatcagccgcgaccggtcggaggccctggcgcgccgcaacggactggacatgggatacttgggacaggcaatcgaacgcatgcgcgccgacgccgcacaagacaaacagtaagcacgcaagcatcgtttcgcgctcaccaattacgacgaacgaacgacgatttcgcgctcacttattaatgatgaacctcgaatgtgtgtctggctcggcgtgtcgcgggggttagatttggcctttttgaatgccgattgagtgggtgtagtcggtgtcgatagcgttgtcgtagagggctgggcgtcctgtttcgtggtcggcttggttctcggtttgggtcagggtggatactttggcgagttggccctggccccagtcggactgcctggcgattcgtactggatcgtcaggcagttccgtttttaagtagagccaccaatccagcatgcggcgttgtcgttcgcctgatctgccgcggtgggttctggcgagcagtttgagctgggcgttgatgccgccttctaagctgttggtggtggatttgatccgctcgggcgcaaggactcctgctggcgggttgaggtagacaaacagcatctcggaccgccaaagatggttgaggctgttgtaggccttgcgcacgttgtggtgggtccacacgcgggtccatgcacctgttttggggtctttgatcatggttttctcgttcatccattcccggtagatcgttgaaaactcgtgcagttgcacaccccacgcggcggcttcatccagtgtggtgatccgggtcagtttcagcgcaagtcggtagatggtgcgcccggcatcggtgcgtgggttggtggtggtgtagcggcggaccacgcgttgggcgtggacgaggcagcgttgaattttcgtagtcggccagcactttttgattgcgctgtatgcgccttggccgccgtcgatgacggcgatgagtggggcttcgatgcgttcaagcagcagttggtagtcgcgggtggtttcgtgtttgcaccagtgccaggcgatcacgtggtcgatggtcgccgcgacgatcaggcagccaccggcggtgtaggtgccatcgagaaatacctggtcgtagatccgcttgtggtggccggcggtggggtcaggcacatcaacgagccagcaccacttgaagcgccgcttcatggtggcgcggctaacaccgtttcgtttggctaggtcgtcgagtgatattgcggtggtgcaatgctcgatgaactgggtgaacactgccgcgttggtgatgtcgtttcgacgtttgacgctggaggcgccgcattgtttgcagcgccatctggtggtgcctttgctggtggtgccgttgcgtttcatttcaccgccgcagtggcagcgtggttggttcttcgacattgcgacaccacaccacgccgcgcatagcacatcacggctgccacaccgaggatttcccgtcgggggctagatatatgcttccggagcatatactttccggaaacctacaggtcaatccgtgaaaatccgcgattccggacacactttttgacccttaacccaccattgtcgaggaattcggccgcactcagtacaagtcatatattctcatcgatttcacacgtttgccgcgcgatgttcgcgacatcttcgaaaaccagcgtgatgactttgacacatttttcatgctgttgtctgcgtattaccgcaagcgactgtacgagcgtgaatcgttgattattttcgacgaggtgcagcggtatccggcggcgagggagctcatcaaatatctggttgcggatggccggtatgactatgtggaaactggttcgctgatctccatcaagaggaatgtggcgaatatcgtcatcccctccgaggaacggaaaatggacatggggccgctcgattttgaggagttctgctgggccatgggggaggagctgcttgctgaaacgattcgcaaatcgttcgagcgtctggtcccgttgcccgatgcgctgcacaaacgagcgatgaggctgtggcgcgaatatctgctggtgggcggtatgccgcaggcggttgccgattatgtcgagcatcgcgattttggcgaggtggatttgatcaagcgtggcatcctgcagctgtacagtgatgatatcggcaagttcgccaatggcgatgccggccgcgtgcggggcattttcgctcagattccagggcagctgtccaagcatgagaaacgattcactctggcatcggtcgataagggggctcgatctcgtgaatacgattcggcgttcttctggttggaagacgcccgcttggtgaacctgtgccgtaattcgactgaccctttggtggggccgggattgtacgaagataacgattcattcaaatgctatatggcggataccggtttgctggtgtcgcaggcgtttgccgatcgagagacaacgccggatgatgtgtaccgggatattctgttcgataaactctcgctcaacgaagggatgctggtggagaatgcggtggctcagcaattccgggcgaatgggcgcaaactgtatttcttctcgcgctcggatagggcggatgccacgaaaaccatggaaatagacttcctcatcgttcgggaatacgataatgccgcgatgaagcctcgcatcagcccgattgaagtgaaattcacgaaacgatacggcgtatcttcgctcgacaaattccgcaaaaggtatgcccaacgattgggcaaggaatacgttctgcatccccgccaactcgaagtggatggagaacgcatcaagctgccgttgtatatggcccactgtctgtgacgcgagaagatggatccgatcgccagctcgtcgtcgatgcccgtatccaaatcaagaatcagtttcctgcgcatattcgcgcctttccctttgcggtattccggtgagtcacagcccgcgtttgacgagcccgtcgaggatggcgtcggaggactccccaagcctcaggcctatgacgtcgacgcggcgcagcagatctcgggttttcagggtgtccatgctcatttcgccggtgtagacggctgcaagccccgattcgtaggcgcgccgcacgcgggcggattccttgctggcctcgaggcagtaccggcgcatgtcggcgccttccgcggtcacggcgagttccagatcgtgcagggcgacgttcacgtgggtcaatgcgacattggcgtgttcgccggcatgtcctttccaaagatggatctcgcgtatgaaatcgcgggtgttgtcgagcacgtcgtcgatggatcgggagaaacggaacagatcctcacggtccaacggcgtggtccaggctttggccaacgcgtgaacgaccttggaacggacctcgtccccctcgtgctcgatatcgttgacgctctttctggattcatcgacgctcagatgcccctcgacggcgtccaacgcgatggacactcctttgcgggtcgtcgtcacctgttcccggagcagccccatgacgggatcctctgcgagcacgttcttggcgttgaaccacggcattgtggcaccttctttcgttcgttgtcgcggcgaacagcatgcgagaggcggtgctcaatagcgaaagcctctcggctgccgtcgttggtcgtgatgatactggagaccatgaagctcgtgcggcggcggtctagggcgaggtcgagaaagaggtaacggcgtgacgcttgataataggtcagacagtagggtggcggcggagcagtgccgagcatgagcaacgatcagcggccgcaggcgatcgaagtgcgcggggcgcgcgtgcataacctgaagaacatcgacatcgacattccgctgggcgaactggtgggcgtggccggcgtctccggttcgggcaagagctcgctggcgctcggcgtgctgtatgcggaaggttcgcggcgctacttggaggcgctgtccacgtacacgcgacgccgcctgacccaggccagtcgcgcccaagtagacgaagtactgcacgtgccggccgcgctggccctgcaccagcggcccacggtgcctggcatccgttcgacgttcggcacgatgaccgaactgctcaacagtctgcggctcctgttctcccgcgtcgcctcgcacgtgtgcccgcattgcggggcgcgcaacgagccgacgctgaacgtggcggccggtctgcccatcacctgtgctggctgtggcaaggaattccacgcgcccggagccgaatcgctcgctttcaactcggccggcgcctgcccgacctgctccggaaccggcattgtgcgcgaagtgaaccgtgcggccctggtgccggatgagtcgaaaagtatcgacgacggtgcggtgatgccatggggctcgctcatgtgggaccttatgaagcaggtgtgcggcgcgatgggcgtgcgcaccaacgtgccgttcagcgagctcacgcccgaagagcgtgacatcgtattcaacgggccggctgtcaaaaagcatattctttacaagccgaagaaaggcgacgatttcgccgaactcgatttcacctacttcaacgccgtatacacggtggagaacgcgctcgccaaagccaaggacgagaaaggcctgaagcgcgtggctcgatttctcaaggagggaccatgcgccgactgcggaggtacccgactgagcgccgcagcccgggccccgcatgtgcgcgggctgaacctggccgaagccagcgcgatgaccttggatgcggcggtggattgggtgcgcggagtgccggaatccctgcctgccgacatgcggacgatggtcaccaacatctgcgaatcattcctggacgtggcccgccgactgttggatctgggcctcggctatctggcgcttgaccgcgccggtgccacgctttcgaccggtgaacgccagcgtgtgcagctcgcccgtgccgtgcgcaaccgcaccactggcgtgctgtatgtgcttgacgagccatccatcgggctgcacccctcgaatgtggacggactgctcggcgtgatgcacgatctagtggcggacggcaattccgtggtggtcgtggaccatgacgtgcgcgtgctcaaagccgccgaccatctcattgaaatgggaccggttgccggcgccgaaggcgggcatgtgatcgagcaaggcacggtagacgaagtggcggcgaatccaagtagtcgtattgcgccgttcttggccgataatgtgagcgcgcgcatccgtgagcgcgtggcggaaccgcaggtgttcgaccttggccacattcgcatgacaaccagccagttgcatacggtcaagccgctggacgttgatattccgcgcggccggctcgtggcggtgacaggcgtctccggctccggtaaaaccacgatggtgctcgaatcgctgattcccgcgctcaaagcgcagtcggcgggggagcggttgccggaacatgtgcgtgaacttgaggccgagggcatccatcgtgcgaatctcatcgacgccacgccgattggcgcaaacgtgcgctccaccgtggccacctatgccgatattcacgacgaactgcgccgcgccttcgcccgatgcgatgcggccaagacgggcggctggaaggccggcgatttctcgtacaacactggacggctgcgttgccccacgtgcgacggcaccggttcgatctcactcgacgtgcagttcctgccggacgtgaccatcgaatgcccggactgcggcggttcccggtatgcgtctgaagccggcgcgattcggcgtgcggttaagagagaatctcacctttcactgagtctgccccaactcatggcaatgagcgtggatcaggcattggctgtgacccacgacctcaagaaggtccacgcacgtctgaccaccttgcatgatttgggtcttgggtatctgacactcggcgaaccgacgccggcgctttcgggcggcgaagcccagcggttgaagctcgccagcgaaatgggcaaagcccaatcggacgcggtattcgtgttcgatgagccgaccatcggtctccacccgctcgacgtgcgtgtgctgctgggcgtgttcgaccggcttgtggcgagcggcgcaacagtcgtggtcatcgaacatgaccttgacgtgatcgccaatgcggactggatcatcgacatgggtccgggcggcggcgaaagcggcggacgcatcgtcgccgccgggacgccggaacaggtcgcggccaacccaagcagcattactgggcggtatttagggtaaggctcaacggacatctttaccacggcgctttttaggaatatggcatgagccggtgtgggcgtggcacgggctgtggctttatcttttctttggttcactcccgagaatgacatgttaacccgtatggcggtcacgcgcattcgcatagggcaaggcgcgagtaggataaccgtccgtggttcaggttcatggcatgagacgcgcaagcgcggacgcgaaatatcagcagatgaccgggcagccggtcaaaccgctgatcctcaaactatgtctgccggccgtcatctccaatctggtgaccactgcctacaatctcacggacacgttctttattggccagcttggcaccgcgcagtccggcgccatcggcatcgcgttctccatcatgaccgtgatgcaggcgctcggcttcttcttcggcaacggcgcgggcaattcgatgagtcgcgaacttggcaaacagaacaacgaacgtgcctcccgactgttggccgtgggcttcgcgggcgcggtgatttccggtttggtaattgccgcgatcgggctgctgatcctgcggccgttggtcgtcatgctgggttcgacctccacgatcgccccatacgccgtgcaatatctgacaccgctgctggtcgccgcaccctgcgtatgcggttcgtttgcgctcaacggattgctgcgataccaaggccagtcggcattcggcatgatcgggctggtgtcgggcgcactgctgaatttcctgctcgcgccattattcattttcgtggccggcctgggtattttcggtgccggcctcgccaccgccatctgccagacggtgagtttcgcgattctgaccacaatgagccgcaaattcggcgtgatgaaactgtccctgcgcaattgcaagccggatgtgctgctcatgcgcgaagtggccggcggcggcctgccttcgctgatccgccaaggcgccggctcgatttccgtgacctgcgtgaacatcgccgccaatccgtttggcgacgcggccatcgccggcatggccattgtgatgcgcattatgttgggcgccaactcggtgatcgtcggcctcggccaaggtttccaaccggtgtgcggctacaactacggtgccggcctgttcgcgcgcgtcaaagaagggtactggttctgcgtgcgtctcgccacctgcgtgctcgtggcgttggcggtgttgctgtgggtgttcgcaccgcaactggtcgagatcttccgctccgacccggccgtggtcgcggtaggtgtggccgcgctgcatatccaatgctgcacggtgattctcaacggcttcaacatgatgggcaatatgatgacccagaccatgggccgcaccggcatcgcctcattcctggccctgtgccgacaaggtctgtttttggcaccgatcgtactgattctgccgatgatgttcggcgtgctcggcgtggaaatggcgcaatcggtgtccgacgtgctgacattcctagtcactatcccgttcatgcggcgaatcctgcatgaattgcggtgaatggtagatggcaactatgaataatcgaagtgcaaagcgggtgccgagcgttccttctcccgcgtatatcgaatcgctgtaccgcaccatggctgccgcccttggcccgaccggatggtggccggctgaaaccacattcgagattatggtgggcgcggtgctgacgcagaatacggcgtggggcaatgtgaatcgttcgcttgcggcgttgaacgcggagggtgtgctcgaaccccataagctggcgattatggggccagcgcatctgcaggaacttattcgcccgtccggcttttatgtcaacaaatccaagacggtacagtcactgagccgatggtatgtggagcgttgcggagcctcacctgagggcgcggcagatattcccgacgccgaattgcggactgaattgctcggattattcggtatcgggggcgaaacggccgacgacctgatgctatatgtgttttcgcgccgcacattcgtggccgatacttatgctcgccgactattcgccttccttggattcgacgtgccggccggctatccggcattccacagggcctattcgcccatggtgctggatacgagcctcagtgtcaaggatttgcaggaattccatgggctcattgacgagttcggcaaggcctaccgcgacgatgcggccaaaagcgagtcctttttgggtggatggagggcttgactgcacggcgaatcgttctcaataagaaaagtgtgaggcccgcacggtgccaatcgcacatctgaatccaagaaatggctgtttgatgctattcccgcgaatgtgcgattgattgatattgtgcgtttgtctcacacttttcttattgagaatgattcgctgcgatatgccgcttacttgacaaccttaaaaccgccggtccatggggtctgattggtgacgccttcagcgctgctgctgcggccttgtccgggttgcggtcgatgacctgcacggtggcgccagccttgacggtgatgcctgtgacgccggcaatccgctctccatcgagcagatcgacgacccctatcgccgcggcatcatcgccgtgcacgatgccgaaattgccgccgagctcgactggctgcgctcaatgctgggtgttgaaaacgagtctgtgacagaatagttcgaccgacacaatcgccaaaacgccgaacaggagccaatgatgaccgaagacaagccgatcgccaagccgattatcgatgatgcgacgcgcgagaaaatggcgcttatgttctccggcgaggtctacctgccggatgatgtggacggcttttttgatctgcaggccgcccaacgcgatctccagcttgaactcaacgccacaccgctgaccaatccgaaacgccgcaccgaactcatgcaggtgttcttcggcgccgcgggggagggcctgtacctcgaatgcccggtgtatgcgaactggggctgcaatacctattggggtgagcgttgctacgccaacttcaacctgacgctggtggacgatggtgagatcttcatcggatcccacaccatgatcggccccaacgtcacgcttgtggccaccggccatcccgtgcgtccggacctgcgctatcagggtgcccagtattcgctgccagtccacatcggtgaaaacgtctggattggcgcgaacgtgaccgtactgcccggagccactattggagacaacgcggtcattggcgccaactcgctggtcaccaaggacatccccgccaacacggtcgcctacggcagcccgtgcaaggtaatccgcgacatcaacgaacacgacgacgtctactactggcgcgaccgtcaattcagtgagcgttttaagctcaaagagcagtagcgccgcgttatcgctgctttgatggaatggttataccgtataccatgttgaacaggtaaaaatcgcgtcgagtgccttctagctgagtcacgaagatagtggctcactcccacacatcgagcttgcggtctttgtagaaacactcacggttcttgtcgccgatttcgcgtgcgacttcgcagggtgcgccgtaagcgaccgagttggcggggatggaatgcgtcgcgaccgagccggcgccgatcacgcaattgtcgccgatggtgactcccggcagaatcgacacattggcgccaacccacacgctgcgcccgagggtcaccggaatgcaatacgtgtaatggtactcgcgcagcaccggcaacacggggtggccggcggctcattagcacggggaacggttgaatgagaagtggattggcatgtggtggtatcgatcatactgatgcgtgtgccgccgagcctgtccagatggctgcctatatgaaccagtgacgggaaatcgcggggagagagcaaacgagaggagtgtgcatggggcagttcggtgtcatgattggccagttggtcggattcctgatcatgctgatggtcggatacggatgtgtaaggctccggttctatgggcagacggcgctggacggcatgtgttcgctgctgctcaatgtgctcatccctgtgctcgtgttctcgaacgccgtcgatggcgcggaccgcgcgcagctcgccgccaactggggcgtaatgctgctgaccgccgtgacgtacgcactgcttatcctcgtattttggctggtcgccaaactgctgcggctcaaaggctcgcgcagccatgtgtttcaggcatcgctgattttcggcaacgccggattcatcggcatcccgctaatcatggcgctttggccacagaacggcgcgatttacgtggctttgatgtcgattatcgaccagacattgctctggacgtacggcgtatggctatgcgagccggttgccgaagcggcaggcaatgccgcaagcgactattctccgacggtcacctgcccctcattcggcacccgcgtactcggtctgctcaaacgattcgtcaatccagctttcatcggcgtgatgctcgccctgatcctgattctgcttggcgtcaaggtgcctgacatcatcttgaagccactgcacaccattggtaatatggccacaccgatgtcgctgatctatctgggcggcctgttcgcattgaccaagtggtggggcgtgctcaagcgctacgaactctatgccggcctggtcgccaagatgatcgccttcccgctcgccttctacgcgctactgaccgcgctgaccggcgcgctgccgcaactgccgatcacccatgacatggtgctgatgatcacggtcatcgccggcctgccgaccatgaccaccatcgccatgttcaccggtcgcaagaacaacatgcccgagtatgcggtcggcttcgtgctcgtaagcacgctgttctcgctggcctcgctgacgatcgtgtcggcggtcgtgttctagtgcgccgcgcataggcacataacagctttcatcacatactctttgcggcctcatcaatgcagcgcagcgcgtcgtattcggcttcgaccggctccagccattcgttcgaagccccatccaccacattcataatggcgatatgcgcgaaatcggaatccggcgcggccccgtgccagtgcttggtctccggctccacgtacaccacgtcgccggggttgagctcgaccgactccttggccccactcctggtagtagccgtgcccgcccacggcgatgagaatctggcaggccttgtgatgaatatgccagttattacggcagcccgcctcgaacgtgacgttggaaacgttgatttccttgcctgaaaccagcggtgccagatagctctgcccgatgaaatatttggcgtatgcgtcgttcggcacacccaacgggaacgcgctgggattggtgatggtgctgtggttctgtgccataaatgccgtccttgaccatgaagactcgcgttggcttggtgccgttgcgccacagcataggaatgtctagtcaatattgcaattacctataacgtatcgattgccatgcttattgagcatgaatcgtcgagagattccgatgctgtgctgttcggttgtcgctgacatttctccggaccagagctggaggcgagtccaaagacccgcaatccatgtgcggtgacgtgcgccatgttgctctcggctcgcgtgaaaatgagtcaatctcacgcaattgcgtgctgttcgtgcatacaatgcgagttgaaagcgtgtggcgtacaactccacgcataatgcctcgaaacatggcgacgccgccggaaagaaggcctcacgatggtcagcacagtggatgatatcaagacgatcgcgaacgtcggcacgggaacgatgggccatgcgattgcactgctcggctgattccttacctatacgggaagcgctgagatatatggcctatgtgccgccatgcttcacaagcatggcggcacataggccataagtattgggtatcgtttcaattgcactgtgatactggatgtgtcgtctgaattatgagatggaatcagtcgatatgtgaaccattaactagcgtggaaagcatggttacatgggattcggaacagtatctgcgattcaagaaagaacgtacgcaaccatcgcgtgatttggcgatgcagctgccgccggatgatggcagtgtcaagcgcgtgttggatatcggttgcggtccgggcaacagcacggccgtgctgcgcgagcgctatccgcacgctgagattctcggtgtcgacagctcgcaggacatggtcgaagcggcgcgcaacacctatcccgacattgatttccagttgtgtgacgtctccacgcaactgaacgatttgccggccgacttcgacgtggtgttctccaatgcctgcatccagtgggtgccgaatcatccgcatctgattcccggactgcttgcccggctcaaggtcgggggagtgctggctgcgcagacgccgatgaactatgaggagccgattcaccgcatcatcggcggtatcgtgcactcgcccgagtttgcggacaagctgtcgcagcagcgcgagttctacaacctcacgccgcctgaatactgggagttgttgcacgcgcatgccagcgccttccgcatctggaaaaccacgtacatgcacacgctgccctcgcatgaggcgattatggactggtatcgcggcaccggcatgaggccgtatctgcaagcgcttgacgacgccgggcgcagggaattcgaggctgaagtgttcgctcgggtctgtgaggaatatccaacgcagtcggacggcagcatcatcttccccttcccgcgcttcttcttcctcgctacgcggtagaagcttaccggattcgcggacctgacggtagggctcgttgatccctgccgtcggttatgggagttccgctcgttaccgctcggcctgcggcgatgccattggttgctgagcagtctccgattgcaatgatgcctgcatgtgtggcagagggggctttgttactgtttattccccgtccaacgaattgatgagatgcgagatggtctcgggtagggtcaaacgcttgatggactcgatgccctgtgtagtgaaaattgatgatgctttgccgaacaagccgagaatgccgctggaagcaaactccagcaccagctgttggctggcgtccagcttggttttgtcaagcttgagcagggtgatccatgcgccgatgaccgccaggccggcatccgcgacctgtgatgacatggatgggctgcgccgtcaggtggaggccctgcggttgggggacgcggtgatgccgtcgccggggcggatggatccgcatccgcgaggagcacgggccggcccgttcgatgagcgcgaagggatgcggcccgaacaacgcggccgcggaggggttcctcggcgggcccgggagcgggttcctccacgggcgtgattggaagggcgtcggctatgaggagttccgtcggcgactggccgcatgtccatccaaaaaacatacgcacccctttacctcgggtgtttcagcatgtcaaaaccggggcgtcagacccgtttttcattatgtggacgccttgggaggcatccggcgacgagggccccgccggttcgaacgggtttggcctccgatgccatactccgtaaaaacttcggcataacaacggttttgtatataaaaacatggcataacggagaaaatgacgaaggaaatgttaataatgaagcatgccgtagcgtgctcgtaacacaaatgacgactccggtacacatgcgattccctaacctcggttccatcaggattcaataccgaggaaaggtgactgatggtcaacggaattcgcaaggcggcgttcgcatgtgagaagtatgtgtccggcaagagtatggacgatgtaatgcgtgactatgggctgagcagcgtcgtcaagctcggatcgaacgagaacatgtacggtccgtacccgcatgcgctggaggcgatgcgtgacgaggtgtcgctgatcaatatctacccggagcgcaactacatcaagctcaaggagctgctggccgacaagttcggcgtcgccgattcgacctgggttagcctgggccacggcgccggcaacgtgctcgacagcatcgcgaagacgctgcttgaggagggcgacgaggtgctcgttccggagcagtcgtaccgcctgtaccccgagatatccaagatcatgggggcgaaggtcatcgaggtgccactgaccgaccggtactccattgatctgcatgactacgcgaagctgctgaccgaccggaccaaaatcgtctggctgtgcaatccgaacaatccgaccggcaccgtcgtgccgatcgacgacttcacgtggttcgtcgaccagatgcccgccgactgctggctcgtggtcgacgaggcctacgccgagttcgccgacgccgacgtgctgcccgatgtgatcgccgccatcaagtccggcaagcaggtcatcgacgtgcgtaccttctccaagtactatggactcgccggcgggcgcatcggctacctgatcgccgatccggaattcgtcaactggtacgacaccgtgtctgagccgttcaactccaaccgcaccggtctggccggcgcggtggccctcctcgagcaggatacggacgagtgccggcgctgtcgcgacctgatggtggtcgaccgggaacgcatgaacgccgagctggcggcgatggggtgcacgccggtgaagtcccacgcgaacttcgtgttctttgagatgccgtacgacgcttcccaggtggccgagttgctgctgcgccggggcgtgatcgtgcgtccctgcggcgggtgggggtacccgaaccacatgcgcgtgagcatcggcaccacggagcagaacgacgcgttcctgtccgccatccgcgacgtgttcgccgagatggcgaagcggtgactggcgggaagacgagaaatcacggcccgcgaggccaaaccgcgggtcgcaacgaagaaacgaaccacgaatcctgtcgcgggccagccgatgacccggacaatgaagaacaaaggaaagatcatgaatccgacactgcgcaagtatctgagcctgatcgtgctgggcttttccggcggcgcgatctactgcctgccgtacatcaagtatgtgttctatgatgcgatgctcgacgtcatgcacatcagcaacgcccaatcgggcttcctgctgtcgatgtatgcgttcgtgtgcattttcctgtacattcccggcggcatcctcgccgacaaggtgtcatccaagaaggcgatcatcctgtcgctgctgggcaccgccgcggtgacggtgatcttcatgctcaccttcagctatccggtggctctgggcgtgtggttcctgttcgcgttcgggtcgggcttcgtgttctggtcggcgatcctcaaggcggtgcgcatgatcggcaccgagcaggagcagggcttcatgtacggcgtgtactacgccgcgaacggcgccggcggcgcgatcaccaacgcgatcgcgctgaaggtgttcgacggtttcgacaatgcacgtgacggcatgttctgggcgctgctggtcatgatcgcggccatggtcgtcgccgccgtgctgctgcagatgctgttgcgcgagtccagccgcgaggagatcgccgagacccccgacagcgagaagtttcacttcgccgatctgggcaccgtgtttaggaatccgacgatttggctgatctccctagtgttcttctgcgtgtacggcgtatacagctgcgcgtccttcttcacgccgtatctgactgacgtgatcggtttcgacacgacgaccgccggctacttgcagatcgtgcgctcctatgtggtcatgctcgtcgcggcaccgctcggcggattcatcgccgaccgcctgtgcaagtccacgctcaagtggttcgccatcggcggcaccgtgctgggcctgtcgatcctcgccgtcattctggtcggccccgacgccagcggctggctggtcgcggtgctgacgctcatccccggcctgttcgccatgtgcctgtatggcgtgatgttctcctccatgcacgagatcgacatccccgtcaaagtcggcggcaccgccatcggcatcgcgtcgatcgtcggctatctgcccgacgtgatcctccagccattcttcggcggtctgattgacgcgaagggcaacggcggctacacggagatcttctggttcctcaccgcgttctgcgtggtcaccgtggtcatcagctacggcctgtaccgcaacttcgcccgccgccatgcgccggccaacgcgaaatcggccgaggccacggcctgaccggcccggcggaacgccacgattcggttcgtcgggccgcggcagcgcgccgaggtccggcgaaccaatctcaatatcacttgagccaacagcaaagggcgtcgatatcatgggctccacatacccgcagttgctggatgccgtcgcggcgttgcgcgacgacgcgttcacagtcacgcagtacctgaccgcgcattccgaggtcggtggccgggaatgcgaatctagccggttcgtgaccgaattcctcgaacggcacggctgcaccgtcgaacggaactacatggattatccgtatgcgtttcgggcctaccgaacggatggcgggcggccccgtgcggccctgatgtgcgaatatgacgcgctgcccgacatcggtcacgggtgcggacattcgctcagctgcggcatcagtgtgctggcggccatggccctcgaccgggtcttccccgattccccgtggcagatcgagttcgtcggcacgccggccgaggagactgagagcgcgaagtgccagttggccgccgacggcgccccgcataacctacacagcaacaaaaggatggattgatcgtatgacgaaaatcgcaatctgcgactacaaggaaccgttgaaccgcgacctcgacctggagcgcgagttcttccgcaagggactcggcgacgatacggaggtgactgtatacgagcaccacggtgacaacgaggcgttgaaggccgcgatccgggacgccgatggcgtgctcacctcatatctggaattccccgccgacgtgatcgaaagcgcgccggggctcaagggcatctccatcgaggccaccggatacaactacgtggatgccgcggcggcccagcgcaatggcaccgcggtgagcgtcatcggcgaatactgcacgcaggaggttgccacgcacaccatggcgctggcgcttgccgtggcgcgcagcctcaagcactacgaccgcgagatcgaggacaagcaccgctatgactggaattcgacgcacggcatgatcaggctggatgattccatcatcggcatcatgggcctgggcaaaatcggcaaggccgtggcccgccgcgcgcaggggttcaacctcaccgtgatcgcctatgatccctactgcccgaaggaggcggccgaagctgtcggcgtcgagctggtgagcaaggaggagctgttcgagcgcagcgacatcatcacactcaacatgctgctcacgccggagaacgagcacatcctcgaccgagaggcgttcgcgatgatgaagcggcatccggtgatcgtcaacgtgtctcgcggacagcttatcgacgaggccgccctggtggacgccttggattccggccaggtgttcggtgccggccttgacgtgcttgaggacgaatcggacgagggcacgcgcacctcgccgctcgtcgggcgcgagaacgtgatcctgactccgcacagcgcgttctactcggacaaggccctgtacgaatgcgcatcgcctgcgagaacctcgtgcacatcctgaagggcgagggtgatgcggtgttccgcatggtcaacgacgtcgacgtatgtggcaacgcccgctgaatcccggaaccggcaacatcatgacgcagatctccgcgcccccgatgattcgactgatggacgtcagcaaaggctacggcggcaagcaagtgctccacggcatcgacatgtcgattgatcggggcgagttcgtggtacttgtcggtccctcgggcggaggcaagaccacgctgctccagctgctgaacaagatgctgaccgtggacgacggcgagatctacatcgacgggcgcccaatcagccgcatgcccggaaccgagctgcgccggagcatcggttacgtcatccagggcggcggcctgttcccgcacatgacggtcgaacggaacatcggcatcatgatggagctggcaggcaggccgaaatccgaggtccgggagcgcgttgccgcgatgctcgacatggttgagctggagcggtcgctgctcgacagctatccgtcgcagctgtccggtggccagcagcagcgggttggcgtggcccgggccttcgcgaccaaccccgacatcatcctgatggacgagccgttctccgcgctggacccaatcacacgcgccgacctgcagggccagttggtggatctgcaccaccggtacggcaagacgatcgtgttcgtgacccacgacatggacgaggccgtcaaatgtgcggatcgcatctgcgtgatccagcatggcgcggttctccagttcgacacccctgcggagatcctggccaatccggctagcgatttcgtcgcctcgttcgtcggtcgggcggaaagcgtcagtagggccatcgcatccatcgccggtcgaggggccggtgcgggcggtaggcgcaaggagttgacgagatgaatgcgatgacgggattgttggatgtgttcatacagcggcatcaggaactgtggcagctgttcgtcgagcatatgcagatgacgtcgatcgcggtgctgctgtccctggtcgtcggcgtgccgctcggcatcgcgatcaccggcagccggcgctgcgccgcggtggtgttgggactggcgaacatcactcaagccattccgagccttggcctgctggccgtgctggtgccgatcgtcggcatcggccagccggccgcggtgatcatggtgatcgtctacgcgctgctgccgatcatcaaaaacacctacgtcggcatgaacggcatcgatccgacggtgctgaaggccgcccgaggcatcggcatgtccgacgggcagatactggcccatatccggctgccgctggcggtcccctacatcatgggcggcgtgcgcatctccgcggtgaccgcagtcggcaccgtgaccatcggcgcgttcgccggagccggaggcttggggtggatgatcaacctagggctcaactccaacgacgtgaacctggtgctactgggcgccatccccgcgtgcctgctggcattggcgctcgatttcgtgctgggcgtggtcgaacgggtgctgacccccgaaggtaccaagccggtcgagaagatacgccgactgggccggcgcgaacgactggtccggtatacggctgccggcttagcggcggcgctcgtgctggtcgctccggcggcgtcgagcctggcgtcggtggtgcaccgcgatgccaacggcacggtggtggtcggcgcagagaatttcactgaagcgctgatcctcggcaacatctacagccagatgattcagcaccacactgatttgacggtcgatgagaaattcaacctcgatggcacgctggtgaccatgtcggcgctagagtcaggcaaaatcgacatgttcaccgactacaccggcgtcatcgcgtcgaacatcctcaaactgggcatgtccaccgataccgatgaggtctatcgtcaggtgcgcgacggcatggcgcggtcctatgacgccaaagtctccaagccgattggattcagcaacacctatgtactggccgtcaccaagcgaacatcgcgcgaattgggcatcaccaacctgtcgcagctggtggcccacgctggcgagctgcgtctcggatgcacgaccgctttcacgcagcgcgaggacctgctgccgaagatggagaagaatctgggcgtgtccttcgcgtcggtcgagggactggaaggcaacatccgctatcaggcgctcggatccggcaaggtcgacgtggtcgacgcgtacgagacggacgccatgctggagaagatggacttggtgccgctcaaggacgacatcggctttttcccgccctatcaggcggtgtccatcgcgcgcaaggctatcttgtctgagcatcccgaacttgcggacgtgctgtccaagctggatgggaccatcaccaccgatcagatgcgcgcgatgaactatcaggtcgatgtaggaggacgcaccccgtacgacgtggctatcgaattcctgaacaaggaagggctgatctgaggtttttgcggcgtcaggggcgcatcgtcgcgcgcctgacgcaggtaccggacgactgaggatacgatggaaggaacggctaaggaaagacttatgggtgatgaggcaacggcggggcgcggcttgacggcgaacgacgggcgcagagctatgcttgatgccggattcgacgaagcggattccgtcatcgtcgccgaactgaggcgcgatggccgcgccacgctgagcgatctcgccaaggcgacgtcgttatcgccgtcgtcggtgcagtcgcgcatccgcaagctcgaacgcaggggagtgcttatcggcgatcgcgtccagatcgactatcacaaggccgggctaccgatatcggcgtttgtgtccgtgctgcctctggactattccgaggagagcgagattcccgacaggctgcgtgaactggaaggcgtgatgtcctgctattcggtggccggcgacccgagctatctgctgttggtgcgtgtgtcctcgcctgaggcgctggaggacctgcttggcgacatccaccgggtggttcccgtgtctacgcgcagcatggtggtgctgaaaacctactatcaggacctgttctgacgcatatggatgcctatacggcatatcgatttgcgcattgctgaacagggccggcggcacttgaagttgccgcccgccggctttttcgcatgtccaacccccccgtatgtggagagagtttcgcgaattacggcgtgttgtggatgactcttgtttgatgcggatgcttgctttcttcgcaaacgtccgtatgtacgcggcaccttcgtcggcccgcatacttacggacgtttgggccgagcgcaacagcatgggcgacaattctgccattaatgcggcgtcaacaattcttcaacagtcgaataacacgaggacgatgccgtgattgtcgtcagtcgaacagctgtacgatacgaataaggaattgatatggtgtgcatccgtggcgattggaagactgagatgccaggaacaggggagagcgggaatggcatcatgaatcaaaaggcacaacaagaaagatatgagggggcagcacttcaggtcgggcagggcgaacgggctgaggggcggatcgagcaagccaagcaaatcaagcaaaccaagcgtctgcggctacgcgtgcctcagtccgtcgaacgcatcaaagcaatgggcctgtaccgtgattaccgggccttggagaagaacgacaaggtggcgctaaccactgctttctccacggcgctgggtggcattatggtcatcgtcaagctggcgatgggcttgtggacgatgtccgtgctgttcatcgtgagcgccgtgtattacgcgatgctatgcatttcacgattcttcattgtcaaagcgcacactcgcaccgtcaaatagccgatcgcatgcaacggttcgctcaggaaaggaacgtttgccatcgcaccggcgcactgctgtgcttcatcgggttgagctacgcggcgttctcactgaccatgttttttaccggttcgccgaacgagtacggtgagattattgccattacggtagccacgatttcgtttatcaaaatcggcatagctatccgcggcatgattgtctcgcataagacccgcaacccccttgactcatcggttaaatttgtgaccttcattgacgcaatgctttcgctggtggtcacgcaggatgtgcttttagagtcccagggaaccgcgcacgcggcacaatcctcggacctgttcggtattgggctcggtactgtggccgtgattatcggtttgtggatgctattgcgccgcaagtggactgttgcgccaaatttcaacggacgaaccgattgatgtggaagtaagtgcaagggggcatggtacaacggccgcatgagcatccaacccggttcagtgccgcgtcgcaatgtctgattaaaatcaatcaggcaatacctttctgatgagaaggaatctatggctcaaaagcgccctgtagcggtagataaacgccgcaaacgaatctacaccatacgacaaatcatagtgtttgtatgcgcgctggtgtgctgtgtgctggcagttttctcgactatgggagccatgcgcgcttggccccaccccggcagcggcaatgggaacgcaacgccatctcaatcagcggctaagcaatccgtgacgcaaccaacttcatttgttgagcgccagcaggtgcctgtcttcaaccatgcgattcaagaacagcggaacaaagaagcacaacgcgcacggtggagcaatcctactggtaagcaacccaacctatcgcagtattccaatttgagcgtggacgtcagcctcgccaagcaagaggtgtacgtcaagtccaatggcaagaccatctacacgatgatcgccagcactggcatggatgacgccacaccgtacggcacctataccatcagtgcgcgcggagatcatttctataatgcatctgaaggcatgggagccgattattgggtgcaattctacggcccgtatctgttccactcggtgcccaccggccagaacttcggcgattatctggaagatgaggcaatgaaacttggacagcccgcctcacacggttgtgtgcgcctgaccgtggccgatgccaaatggttctacgatcaggtgccggatggcacgccggtgactattgcatagcaatcgtatgcatagcaatcgtatggcgtcggcagactggtgctttgaggctcgactcatcagaggaaatgctatcggttcaggaaagaacccggtcagcgctcctcaggcggtcgatactggtcgtctgaggtaaagcaggtgcggtataccatgaccatgattaggccatcggccagcagtgtcagcgcggcaatcgcaccgaacaccacgaactgatatttggcggcattcagcggatcgccaccggcaatcacttggccggccatcatgccaggaatcgttacgatgccgctggaagccagcgaagcagtggtcggcaataggcccaagcgaatcgaggagacgatggagggacgcgctgcctcccaaggggttgcacccaacgccagcatcatatccacttcgtcgcgccgctcttccatgctttcatagaatcggctcaaccccaccgccaaggcagtgacggtattgcccaacaacatgccggtcaacggcactaccagctgcggcgcataccacggatgagggcgcacaatgagttcggtgaccagcgccagcataagcagcattgtgatgaccaaactcagaaatatcgggccagccagacccctgggaatgcctcgggcgcgcgacatcacgatttgcacggcggcaatcagcataaccgccatcaatgcgaacaccatccacacgctgttcgaacggattacatagccaataatgaaacccatggcgcacagctgcaccaatgcgcggcatgacgaccacatcaaggtcttgccaatacccatgtgcatcagttcgctgataatggccgccacagccaccatgcccaacgccaggacgagaccccagacgtcgatgtcgtaggcgccgttcatgggcgcacctccttatcccgcgtcagatcggtgagccgtcccgcatcgagcatcagcgtgcgggtggcgcgcccgtccggcggacggtgtcggatgcggatgatcgccatgccgtgtgcggccgcgtccgccatgatcgcggccactttggatgcgttgtcgtcgtcgagtccggcgtccacctcatcggccagcagcactttcgggtcggtgagcagcgtgcgggccaacgccacgcgcgccgcctggccgcccgacagatcatgcggcgcgcgcgtcaggtcgatgtcctcgcatcccatcgcgtccagggtcgtgcggatgcgttcgtcgggcagcagccgcgcggccttgccccccttgcctcgaatcgcgagcgtccagggcagccgaatcgcctcggccacgtccttgccggtcagggtcggtttttgcggcaggtaggagacgtcccgccgccattgctgcgcgctgaattcgtcactgcccacgccgtcgaggacgaacatgccgtgcgcgtgcgggttgagttgggcgcatgcggtcagcagactcgatttgccggagccggatgggcccaccaggtcgatgatgtcgccgcgctccatgccgaaggacaggttgtcgaacaccgtgcgttcgtcgtccgccggcgattgcgcggggacgacgcaggacacggacatggcttcgaagaaggatcgcatattcatccagtctagtcaggggttcacgtgggaaaccccagtgttcacttcctgtatacccggtgtggcataataaccaaggcaatttttgggctttgcctaagctagtttgaatttgaaataggtgaataacgtggcacagactactaacgacatcaagaacggatccgtcctgaacctcgacggccagctgtggaccgtcatgaagttccagcacgtcaagccgggcaagggccccgccttcgtgcgcaccaccatcaagaacgtgctttccggcaagatcgtcgacaagaccttcaacgctggcatgaagatggaattcgagaccgtggacaaccgcaccctccagtactcctacgaggacggcgacaacttcgtgttcatggacatgaccacctacgatcagatcatgattccgaagaccctcgtgggtgacaaggccaagttcctgctcgaaggcaccgactgcctcatctccttccacgacggcactccgctgaacgtcgacctgccgggctccgtgatcctgaccatcacccacaccgagccgggcctgcagggcaaccgctccaacgccggcaccaagcccgccaccgtggagaccggcgccgagattcaggtgccgctgttcatcaacgagggcgaccgcgtcaagatcaacaccgaggatggctcctacaccggccgcgagaactgattttctccacgcaacatacctagtcgacagtcgaaccaaaggaccagcagtatggcacgttccaccgcgcgcaaaagggcgttgaacactctgtacgaggccgacgaaaagggtcaggacatcctttccctgcttgatgagcgcatcgcgcatcccggtgctcagaccccgcttcccgactacgccatcgacatcgtcaagggcgtggccgaacaccgccgccagatcgacatgaccctggacgatcactccacgggttggaaggtcaggcgcatgggcgtggtcgatcgcaacatcctgcgtatcgctgcttgggagatcctgttcaacgacgaggtgccggacaaggtggccatcgacgaggccctggcattggccaagaccctgtgcgatgacgattcacctgcctttatccacggcctgctttccgcggtgtgcaatgcgaagaacaccgagcccgcgggatcggtggacgatgagcccgccgaggaatcgaacgaaccggaccagtccggtcaaaccgattttcctgcatccgagcccgtcgccccgtccgctgagacccagccgacggtcgattagtcatttgttttcaagcctccctccgggaggcttttttatggacggaacaactttccgctgtgattgtccaagccggttgtgagccggctgccccgccagcggggcgagacttcgcgcgcaccggcgtgtgagtctgcgctggccgttaaccttggtacgaatacccgaaaaacataagggggttttggtgagccagaacgagtccggaaccatcgcaattccgatgtatgacaaggacgatgcagtcctcgttttggaagacggacaggtatatgtgggggagccgtatggcgccctgggcgagacgaccggtgagatcgtcttcgccaccggcatgaccggataccaggagacgctcaccgatccgagctacgatcgccagatcgtcgtgcagaccttcccgcacatcggcgataccggcgtgaacggcgaggatcccgaatcctcgcgcatctgggtggccggctacatcgtgcgtgatccctccccgaacgtgagtaactggcgtgctgagggcagcttggacgatgacctggtcaagaacggcatcgttggcctgagccatatcgacacccgtaagctggtacgccacctgcgttccgcaggcgtgatgcgcgccggcatcttctccggcgaggctttggtcgatgccgctaccggcaagctcaagaccatcgagcaactgcttgaggatgtcaagaacaccccgcagatgcagggcctgagcctgtacgacgaagtctccaccaaggagacttacaccatcgagccgtgcggcgaatacggaggcaaggagccgctgtacaccgtggccgccgtggaccttggcatcaagggcatgaccccgcatcgtatggccgagcgcggatgccgcgtgcacgtggtgccctccaccatcacctttgccgaactcgaagccctgaacccggacggtgtcttcttctccaatggcccgggcgatccggaacaggccggccccgaaatcgaactgttgcgtcaggtgctcgatgccggctacccgttcttcggcatctgcttcggtaaccagttgctgggccgtgcgctcggctttggcacttacaagctgaagttcggccatcgtggcatcaaccagccggtcaaggatctgaccaccggcaaggtcgaggtcaccgcccacaaccacggcttcgcggtcgacgccccgattggcaagcaggtcgatgcaccattcgaaaacggcaagtacggcaaggtgttcgtctcccacatcgatctgaacgatgacgtggtcgaaggcctgcagtgcgtggacattcccgcgttctccgtgcagtaccacccggaggccgcagccggtccgcacgatgcggcctacctgttcgaccgtttctgcgaacttatgaagaacaaccccaaggaaggtaagtgatatgccgaagcgcaccgacatcaaatccgtgatggtcatcggctccggcccgatcgtgatcggtcaggctgctgagttcgattactcgggcacccaggcatgccgcatccttcgtgaggaaggcatccgcgtcatcctcgtcaactccaacccggccaccatcatgaccgacccggagatggccgacgccacctacatcgagccgatcgccaccccgatcctcgagcagatcatcgccaaggaacgccccgacgcgctgctgcccaccctcggtggccagaccgcgctgaatgccgccatggcgttgggcgaggcaggcgtgctcaagaagtacaatgtcgagctgattggtgcttctctggaagccatcgaccgcggcgaggaccgtgagctgttcaagaaggtcgtggacgaggccggtgccgaatccgcccgttcccgcatcgcgcacagccttgaggaatgcgacaagatcgccgaagaactcggctatccgctggtcgtacgcccgagcttcaccatgggtggcctgggctccggcatcgcccacgacgaagaggagctgcaccgcatcgccggcgccggcatccattactcgcccaccgacgaagtcctgatcgaagagggcatcgaaggctggaaggaattcgagctcgagctcatgcgcgaccgcaacgacaacgtcgtggtcgtctgcccgattgaaaacgtcgacccggtcggcgtgcacaccggtgactccatcaccgtggccccttgcttcaccctgaccgatcgcgaataccagaagctgcgtgacatcggcatcgccatcatccgcggcgtgggcgtggacaccggcggctgcaacatccagttcgccatccatccgaagaccggtcgcatcatcgtcatcgagatgaacccgcgtgtttcccgttcctccgctctggcgtccaaggcaaccggcttcccgatcgccaagatcgccaccaagctggctctcggctatacgctggacgagattcgcaacgacatcacccagtccacgccggcctccttcgagccgaccatcgactacgtggtcaccaaggtgccgcgcttcgcattcgagaagttcccgggtgccgaccccaccctgaccacctccatgaagtccgtgggcgaggccatggctctggccggcaacttccaggagtccctcggcaaggccatgcgctccattgacaagcgtcacatgggcttcaactgggacggcgataagccgtccgcagatgaggtagctgagttgctcaaggccattcatacaccgaccgaacaccgctacctgcagctcatgcgtgccatctggggtggcgcaacgctggatcagctgtatgcggccaccaagatcgacccgtggttcctgaagcagctgctgctcatcaacgagactgcacaggccgtgcgcgaggccgagactctgaccccgaagctgctcaagaaggcgaagctcgccggcctgtccgacgtgcagatcgcccatcttcgcagcctcggtgacgaaggcgagaacaccatccgcgaattgcgctggaactatggcctcaagcccgtctacaagaccgtcgacacctgtgccgcagagtttgatgcggccacgccgtactactacagctgctacgccgatgagaccgaacttcgtccgcgtgagcgcgaggcggtcatcatcctgggttccggcccgaaccgcatcggtcagggcatcgagttcgactacacgtgcgtgcacgccgtgcaggagctcggcaaggactatgacaccatcatggtcaactgcaacccggaaaccgtgtccaccgattacgacatgtccgaccgcctctactttgagccgctcaccttcgaagacgtgctcgagatctacgaggccgagaagaagatgggcccggtcaagggcgttatcgtccagctcggtggccagaccccgctctcgctggccgcgcgtctgaaggccgccggtgtgccgattctcggcaccaccccggagtccatcgacttggccgagaaccgtgagctgttcggcgaggtccttaagaaggcggagatgaatgccccgcgttacggcactgccctgagcctcgaagaggccaaggaagccgcacatcgcatcggctatccggtgctggtgcgcccgagctacgttctcggtggccgcggcatggaaatcgtttatgacgacaagcagctcaacaagtacgtggatcgcgcgcttgccgaggcccaggccgatactgtggtctctggccgtctgccctccccgttgctgatcgataagttcctgcaggatgccatcgaaatcgatgtcgatgcgctgttcgacggcaaggagctgtacatcggcggcattatggaacacgtcgaggaagccggcgtccattccggcgacgccgcctgcaccctgccgccgtctacgctgtccgacgaccagattcgccgtctgcgcgaaggcacctacgccatcgcctccggctgccacgtgcagggtctgatcaacgtgcagtacgccttcatggccaacacgctgtacgtcatcgaagccaacccgcgtgcttcccgtaccgtgccgttcgcctccaaggccaccggtgtggctctggccaaggccgccgctcgcattatggccggcgagaccattgccgaccagcgcgccaacggtctgctgctacccaagggcgacggtggcgacatccaccccggacagcaggtcgcggtcaaggaatccgtgctgccgttcaagcgtttccgcactccggtgggcaagaccgtcgacattctgctcggacctgagatgcgttccaccggtgaggtcatgggcttcgaccgtgacttcccgcacgccttcgccaagagccagctcgccgcctatgacggtggcctgccgacccacggcaacgtgttcatctccgtgaacgacactgacaagcgacagctgccgctgctcgcagtgcgcctcgaagagcttggcttcaagctttgggccactgagggcaccgcttccgtgctgcgccgttacggcatcgactcaaacatcgtggacaagatcagcacccgtgtggacaccgatccggaagctccggttgaggtgcatcatgccgccggatccgtgggcaagaatgtggttcagctcatcgaagagggcaagatcgacatgattctcaacacgccgaactcccgcggctcccgctccgatggctactccatccgcgccgccgccatcgccgccgatttgccgcagttcaccaccattaccgagttccaagccgcactgctcgccatcgaggccgtgaagcataatgattatcagatcatgagcatccaggagcattcgaagcagctgttcgaattggagaaacaggggttctgatggttgcacccagcgatgaggagttgcaggcccagcgttccgatttcggtctgcgtttgagcaattcgatggccaaatacgggccattgtgcgtcggcatagacccgcaccgcaaactcctcaccgactgggggtacaacgtcgacgccgaaggtgccgagctgttctccatgcgcatgctgcaggccgccaacggtcgggccgcagccgtcaaattccagacgccgatgttcgagcgctatggagccaagggctttgaagcgctcgagcgtgtgctctacgctgcccgtcagatgggtgtcatcactatcgtggattgcctgcgtggagggctctccactaccatctccgccattgcggatgcctacttcaagcctggtgcgccgctattggcggacgccatcaccctgctgccgtattatggcgcgcgttcactgaatggattgattaccgaagcgttggaaaacggacgcggcgtgttcatcgcctcgttgacgtccaacccggagggcatgagtctgcaaaccgccatccgtcagtccggcgattaccggggacgtaccgtggcattcggtatcgcgtccaacgcgcagcagcacaatgcaggcatcgacggtatgggctcggtcgggcttatcatcggtgcgaccattggccagtggatgaaagactccggtgtgaacccctccgaattcaccggccctattctctctcccggctacggctggcagggtgccgaagccaaggacctgaaaaccgtgttccgcggcacgcgcagcaacgtgctggtcaccgtatcccgtttcatcgcctcgcacgggccggatatcgcttcgctgagccaggccaccgagtcgattgcgctcgacgtgcgccaggcgctgatggaagccaccgctgagggcgacgaaaaccagtaacccacaggaatctgctactgcacattggaggaattcatgaccgagaacactcacgctggccgtctgatcgtcctgaccgggccgaccgccgttggcaaaggcactgtggaggccaagctgcgcgccggtcacccggaagtgtgggtgtccgtttccgccaccacgcgcgatccgcgtcctggtgaggtcaatggcgtgaactactggttcctgtcagaagacgagttcctggccaaggaacaggcgggggagttcttggaaaccgcagtggtgcatggaatggcccattacggcacgttgttaaagcccgtcgaagagcatctggctgctggtacacccacgattctggagatcgatttgcagggtgcccgccgcgtcaagcagcgcgcctctgagcttgatcttgaggtggtgtacgtgttcattgcaccgccgagcttcgaggagctgaagcgtcgtctgattggccgcggcactgaaaccgccgaacagcaggctcgccgtttggaaaccgccaaggtggagctggccgccgaaagcgaattcgatgtgactattgtcaacgagaccgtcgatcaggccgcagccgacctgtggaacgtcatcgcccaggaatacggcttgtagtttttctcttttttggggagccgagaacgagctttaccgctgtaccaccaactgctggtgcagaatttcggtgctgttcttggctggtgcctgcttccatcggatcgtgctggattcatggtgctcgctgacataatgccgcatccattcgaagcactgctgggtttggatggcatcgcttaatgcgcggtgttcctcgttatcggcaatgccgaatcgtacaatcaggtcggcgagccggtgatggctctgcttggggaacagggcacggctgatttgcatggtgtcatagtcggcgcagacgaatccgcatcccgcaatatggcgggtgttatagtccaggaatcgcagatcgaagctgacattatgaccgacgatgggctcggtctcagccgcggcgttggaatcggcgagccaggaaatgaattgggggagcaccccgtcaatgggatcatggtcggcgaccatcgcgtcggtaatgccggtcaacgcggtgatttgacgaggaatcgggcataacgggttgatgagttgctggaactggtcaacgacacggccgccgcgcacgcgtacggcacctatttcggtgatggcgcaacggttcggataaaacccggtggtctccaaatcaagcgccacataatcggtggggaatccggtggcgtcttcggcaatcggggtgccggcggtccagtcgggatgggactgctggccaaaaacggtaatgccgggaacggtcactggatgctcctcctatcggttgatgttcggtgatttattgtagcggcagcccaacctgacgaaaaagccccatatctgcgaaccgggtacaggggcgggaaatcagctgatacagccgattcggttactgctgtatatcgtcaagtttgtcttgtatcaacttgtcgaggtcattcagctctttagacgggttggccgtttcgtccaaactcgtgagtgcgtcgttcagctccgttgaggcatcgtacggatattcgatgtcatagtactgatccaagagattgtggtactggttatagacatcggtgccgtactcgatgttgttgggtcacccagggccttcaactgatccatgaggtcgccgaccttggtcatgtagtccttgagtgtggtggcgtatttggacattcccttgaccttggaatcactcagtttgtcaagagcggcggtaatccttcgtcggattgccgatatcgggggaaataacggatatatttggtaacgaataatcgggctgtcgggaaaggtggcatatgaaacggatagtggcaggcatcgtggcacatgtggatgcaggcaagaccacactatccgaggcgttgctgtatcgcactggtgagattcgcaagttgggccgcgttgaccatggcgatgcctttctggatacgaattcgctggaaaaggcgcgaggcatcacgattttcgcgcatcaggcactggtggagcatggtgatctgcgattgaccttgctggacacgccggggcatgtggattttgcggccgaaaccgaacgcgtgctgcgtgtgcttgactacgcaattctggtggtctccggtaccgatggggtgcaagggcacacggaaaccctatggcgtttgctggcaagatatggtgtgccgacgttcatctttgtcaacaagtgcgatgcagacggattcaacggtgaagccgtgctggcccagctgcgcaaacgactgagtgatgcggcgtatccgttgcctgcaatcgatggattgtccgatgacgatgaggtgccgttaggggagtctgccgaggatatcgccacactggatgaaaccgcgatgaacgactatctggagcatggcgggctgtccgtagtccggttgcgcgcaatgatcgccgcacgcgaactgtttcccgtgtacttcggctcggcgttgaagttggaaggcgtcgaggagttcttggatggagtggaatctttcaccgccgaaacgcagtggccggaacggttcgccgcgcgcgtgttcaaggtggcccatgacgggcagcacaatcgcatgacatggctgagggtcaccggtggcatgttgcaggccaaggaaatcgtatcgtcgtcaacgcggaagaccgccgagccggcatggtccgagaaagtcgaccaggtgcgtgtatacaacggtgccaaattcgatacggtcaccgaagtgccagccggtgcggtatgtgcggtgacagggttgacgcagactttcccaggtgagggattgggctatgagccggatgccgaatcaccgtcgctgcagccggtattgacatacacggtgcttcctgcagatgcgggatcgggcgatgccgaaaacgtcggccgagatgctgctcagcgaaataccggacagcatggagtggatcccgacaattcagatgatgctcaggaagacagcggattcgtggcacgcccccgattcgatgatctgactttgcataaggtcatcaccgcattgcgtgagctggaggacgagaatccgttgctgcatgtggtgtgggtggaacggctagccgaggtccatgtgcagctgatgggcgcagtgcagttggaaatcattcagcagaccctgcatgatcgtttcggtcttgatgtgtcgttcggtccgggctcgattctgtatcgtgaaaccatcaccgagccaatcgagggcatcggtcattttgagccgctcaggcattatgccgaagcgcatattctgctcgaaccggggaagcccggaagcggcatcagcgtggcatctgctttgtccgaaaacgatttggatcgtaactggcagcgtctgattcttacgcatctgaccgagcgtgagcatctcggcgtgctagttggtgcaccgctgaccgatatcaagatgacactggtggcaggcaaggcgcatctgaaacataccgaaggcggtgacttccgtcaggccacctatcgtgcgattcgtcagggtctgatggaagccagagccggagtcagcggacgtcccggctctccggttgaggaacgccccgataccacgggccagggcaactgtcgactacttgagccgtggtatcgattccgtcttgaagtgcccgccgatatgatcggccgggcgatgagtgatgttcaacgcatgtctggcacgttcgattcgccgtccaccgacggtggctacgcagtgattgaaggtgaagcgccggtttctgaaatgcgtgactatgcgatggaagtgaatcagtacgcccatggtcatggccggttctccgccactttcggcggttataagccgtgccatgacgcggaacaggtcatcaagatagccggctatgaccccgaatcggatctggacaacaccccggattcggtgttctgcgcccacggtgccggctatcccgtcaaatggtataaagtcccggaattcgcccacttggattatgccactaccaaatctgcggcctaataaacccgttcttctccagaaaacgttggatatcacgcatctcaggcatattgattgaatgggccatgcccggatacacttcttcggtcagcgtgccgtgctcacgccagaatgtgcccatcgccgcaacatcggctttggggaagatatcgtcaatcgcgccatgcccatagaacaccggcggctgtagcgaagcgagctgtgcatctccgtcaacggtgcccggcgccagccagcctgaacaggatacggctgcagcgtaccggtttgggttgaatcgcagcatatgggtggccagcaatccgccctgcgaaaagcccatcatgactatcggccgggttgcgggaatgtttgccccgacccatgcatcgatagcctgcgccgcggcaagtgcctgttcgtccaatgatttgccttccggcacgccctcatgcgcccatgagccaaaccatgtgtatcccatgccataggcgatgggagcctgcagactggcatagtcggcggaaccggccccacagtagttcagcaagtcgggcaggtcgtattcattggagccccagccatgcagtagcatgaataccgggtcgttttccaggcccttcaatcgggtcaaagccttggtaatttccatgcctcccagtgtagccatcgcgagtgtcggaacgggcgtttgaaccatccataagcaacccatatagccacgccgttcaattcgctgcccatttgcgttatggtcataaccaagccgcgcggggagtggcttcgcgcagataacgcaacaataaagggggtgcgcaatgaccaggttcaacactcagctcgtccacggactgccggttggagacaacaacaccggagccgtgaacccgccgatctacaactcgacgacatatgctttcgagagggtcgacgcgatgccccgttatgactatgcgcgcagcggcaatcccacacgcgacttcctggaacagcagatcactcagctcgagcagggaacgcgtggttttgcgttcgcctcggggctggcggcgattcatgcggtactgagcattttcaagcccggtgaccgcattgtggtcggtgacaatatttatggcggatcgtattcccagctcaatgagttcttcactcgctgggggatcatcgtcgaggccgtcgacactcaggacattgcagcattggaggccgccgtcaaaggcgaccgcgcgaacggcatcgcgcctgcccaagccgtctactttgaaaccctgaccaatccactgctcaaagtgaacgacgtgcgcgccatctccacggtggcccaccgtttcggggcgctttcgattgtggacaacacgttcgtgaccccgtacctgcaaaagccgcttgcgctgggtgcggatgtggtgattcactccgccaccaagtatctggccggtcattctgatgtgaacgccggtctggtggtcgtttccggtgaggatctggcgaaccgcgtgtactttgcgcagaaccgtttgggtggtgtgttggctcccgctgagtgcgacgcggtacgccgcggcattcagactctggccctgcgcatggaccgtcagcaggagaacgccaatgccattgcctgctacctgctggtgcacccgctggtcaagtcggtgcattacccgggactgcccggtgccggcgatcagcatctggccgccaagggactcaagggtgccggcggcgtgctgagtttcgaggtggtgcccggcgttgaccctgcggatgtgctcaacaacctgcatttgttccggcttgcggtatcgttgggggctgtggagtcgcttgccgagctgccctgtcgcatgacgcatttcgagctgccccgtgaggagcgtctgaagatcggcatcactgatgagctggtgcgccttgccgttggaatcgaagacgccaacgatttgattgaggatcttggtcaggctttcgataccgcctacgcccgttacatcgatcgacatgccgatactgacgtgttccaacaactgacttcgggggtgttcgcctgatctgatacttttcctgcctgtttctactcctggggagcggcgtcggttgtgccacaccggcgccgcttttttatgcctttgttcttgttgggccggggatgctgtcggtattatgcgagctgaatgtggtttttggttccgttcctcggtgggacttggcttttatggcgtagatgcagagagaaaaatcgactcgtggtggtatctccctgcaactcgcggatttcgtgccatgtaagaagggaaccacgttttttccgtgttatgtggcaaaccgtcatcagggcaagactgcgtatgcattatgccagacgcgtatccatcacgtctcccgttatgatggacacgatctagcaaaacaggccgcgtgagagctgtacgcggtgaaacagaggaaaggacccgacatggccattgatatctacggtgctacatggtgcggtgactgccgtcaagccaagaacacgctcgacaagctgggggcggcatacacttggcacaacattgaggaagaggaaggcgctgccgaccgtgccgtggccatcagcggccagcagcacattccggttgtgttgtacggtgacggctcgttccaggtggagccctccgcagtggatatcaagaacaagctgcaggagttgggggagctgaccgactagggctcggtccaagaattacatgggatgcacgttcgcctgcttatgaatgttggatgagtgttcgggactcacgcgggctccggctgtttgtgcaatgcgggttggatctggtggaagctggtacattgtatgccagcggaaagatcgtgctagcttcggagcgattctcttgacagcattactgactttcatttcgttggatctgaccgtcgaggtttacctttgacctcgaattatgtgcagaaagggcctgacgttctaagacgttgggccctttcgtcgattaggcggacaacggttcgttccatcttgcgcagttgtcttcattctgagttctgtgtctgttgtgacaccgtctcttttttgaacatcactaatgcgttatcgacataataaccggttatcaaacgcaggaaataaatgagtcttcgccagtttgtgtggtgggaaagccccggcaacggacgccggggcttttttcccacacacacaaactggcgaagactctaaaaaatggacttgcgaaaatgggattgctgtttttgcgtatatagccaatgcttataagaacacatcagcaattgcaatatcttcgtgccggtgtcacgcgtcaaggcttgctaagttcggaaatagaatttatggcggtaggggagagaattgatgagcgaaagtttccaaacacaagccatccacgccggatacgatccgctggctaacggtcgtgcctccgtgccgccaatctacgcttccgccgcattcgacctcggcgatgcggctcgcggcgatgcgctcgcgggtggcgacatcgacggcttcgaatactcccgtgtggccaatcccaccgtcgatgccttggaaaggcgactcgctgcgctggaaggcggtatcggtgccgttgcagtgggctccggtatggccgcagtgagttatgcgctgatgtgtgcgggggagggcagcggccgcatcatcgccccgaccgacctgtatggcgccagtgtggatgcgctcggcgattttctgccgcagttcggcattcacacggatttcgtgaaagacatcaacgatctcaaagaggtcgaatccaaaatcggtcccgatactcgggcgattttcgctgaaaccgtggccaacccctccacggcaatccttgatatcgagccactggccaagctggcccatagtcgcggcatcgccctgatcgtggacaacaccgtacctacgccgtatctgctcaatcccgtcaagttcggcgccgacatcgtcgtgcattccaccaccaaaggcatcaccggccacggcaacgccatcggcggcgcaatcatcgacggtggcaacttcgactgggcgaacggccgattcccgcaattcaccgcacgccaacaggtcatcagcaacgaccgcgccggcgaatggcacagtttcgctgaaaaattcggcaatgccgcattcatcaaacgcattcgcatcaagtacctgcgtacgttcggtgctgtgcaaagtccattcaatgcctacctttcgctcgttgggctggagacgttgccccagcgcgtcagtcagcaggtggcttcggctcagcgcatagccgaacatctgaccagtgccccgcatgtgaccaaggtcaactattccggtctcggttacacaccgcaatacgaacttgtaggcaagtatttcccgcgcggtgtggggcaaatcctgagcttgcaagtggatggcagcgccgacaatgtccgccgtatcatcgacggtgccaaactgttcatctacgtgcccaacatcggtgatgcccactctcttatcgtcgaccccgcgcacatcacgcatcgcgaagtgccggccgaagcgcgtatagccgccggcgtcagtgacaacctgattcgcctatccataggtttggaagatgtcaacgacctgatcgcagaccttgatcaggccatcgccgcagcatactgattggatgccgcacatcttttataagaagccagcatgcacacatagtgaacagttgtacacatatgcgtacgatgtctaccgctttgtttgaacgctgatacgatggaaatcacgagtcgaggccgagggcggtttcgacgtggatgaagggaaaacatcatggccgtattctttgctggccggctgattgcattgctcattatcatcgtgctactcattgttctgctgagtgccgcactcttcgtcgtgccgcagcagcaggcctacatcattgagcgattcggcaagttccttaaggtgcagttcgcaggtattcatatccgcattccgtttgtggaccgtatcgctatgaaaaccaacatgcgtgtcaaccagcttaacgtgcagctggaaaccaagactcttgacaacgtgttcgtcaccgtggtggcctccactcagttccgcgtgaacccgaacgatgtagccaccgcttactacgagctgcgtgacccggccggtcagctgcgctcctacatggaggacgcgctgcgttccgctatccctacactgtctttggacgatgcctttgcccgcaaggatgacgtggctttcgatgtgcagaagaccgtgggcaacgagatgagccggttcggcttcactgtggtcaagaccctgattaccgccatcgatccgagcccgcaggtcaagaacgccatggattccatcaacgccgcccagcgcgagaaggaagccacccgccaacgcgccgaggcccagcgcatccagatcgagacccaggccgccgccgaggcggagaagacccggctgcagggtgagggccaggccaactaccgccgcgaaatcgccaacggtatcgtcgaccagatcaagagtctgcaggccgtgggtatgaacatcaacgacgtgaacaacgtggtgctgttcaaccagtacctcgatgtgatgcgttcgctgtccgagtccggcaacgccaagaccgtggtgttgcccgcctccacgcctggcggctatcaggatctctacgaacaggtcaccaaggccatgctcaccgccaacgaaacgaagtaatcggcctatttgcaaccgcatccatcgttagtgaagcccctccaagcgaggggcttcactgcgtttcagctctgattccatatgaattgatatcgtcgcgaccggtttagatttcaacgagtgcgaaaattgactgtatgcagattgtaacgagtgcgcgaattactcacctatagattgcgacgagtgcataaagaccctgagttctaaatagaagtgcaacaccttcttaagttagaaactgaacacttccaaccttagacaaggtgttgcacttctatttagaactcaggagatgaattcctttggcttactcgtgctaatgttgcgctgccggcatttagtgttgctgcccccgtggctccgctgagagccagtaaagaacgtcgattgctgaaactgttctattccgatgtgggattgctgaccagctcgcatggcaagaagtcagcactgggcatactggatggtcaggctgcaatgaacatgggcggagtctacgagaatgtcgtggcgcaggaactcaccgcgcatggatttaccaatctctattacttcacgaaaaaagggattggtgagctggatttcctgatagagaccgatgacggtgatgtgttggccctggagattaagtcgggcaaatactaccgttctcatgcagcccttgacaatgcgctgaacactgacggctacgccattgacagggcgatagtactcgcggaaaccaacgtattccaagagaaaggaatcacctatctgccaatgtatatgctctcaatgctgattaatgagtaattgccaccttgccttgcaaactttctcgctgacggttgctcagtgagaaaaatccgcaaaacttacttgctgaggaactcggggatggcctcggccgccgcatagcctttgcggtacatcatttccagaccctcgaagttcttttttagggtgttgagaccatagaggtcttccggggcgagaatcagcacgcggccttctgcctcatactgtttggccatctcgatttcgtcgttataggtcttgtaccgcatgcgcagcttttcagccgcggcggggtaagagcgttcgaggatacgggctggagccagatccttctgctgtttgcgcacctcgttgcgcagacgggagagaatcagaatcaccttgtcgtagccatcatccaatgccttctgcaccgggactggatcggcgatgccgccgtcgaaatacggcacaccgtccactacatacggttcgcatgccactggcacagccgacgaggccttgatgacatcgaagtcatcgaatcgcgcacgcgacttgtcgaaatacttggtcgaaccgtcttcggcgttgcacgctaccacggtaaagccggtgggattggcctcgaaagccgcgtaatccaccgggttctcgccatcgtggttgctcagcgtgccgtagatatagtccaggttggcaaagttgtgatttttgaaataactttccgcgctcgcgtattccttacggaacgcgtacttggtatagaaagtgtggttgcgcccatgctggcgggcgatgaacgaggtcatattggctgcccccgcggacacgccgtaacacatgtccacatcaatgccatcttcgagcatgcgatccatcacgccgcagccgaaaatagcacgaaagccgccgcctacatcaatcattgcggtctttgccataccaaaccccctattttgctcaagtagtcatgagcttacgcgcgctgtttggacaaagatgtgggcaatggacccacgaaatgtctgtttatttgccttggctcccctcaaagagggtggccaaggtcaggcactcagcaggtcatgcgacagcttggcaatgcgctcggatgggtcggaattggaaatctccacgcggccaagtgcatcctccggtgccagcttacccaatgattccaataccacgccaaggtgacgaaccgtaccctcgttgccatcgatgattgcggcatgcttgggcagcagttcacggaaatagtcgcggtagaacacgaaatgcgtgcaccccaacaccacagaatcaatgcggtccaggtcatatcggtcaaagtagtggtgcagcgtgcgcatcaccagatcatgattgccaagctgaccggactccacaatctccaccaggtccgggcagggttccttgaaaatcgtgttatcggagtcgaaacgcttcataagctcggcgaatttccgctcacgcaaggtcaggggagtagctgccacaatcacccgctgtggaatatgctgctggccgagaggggcgtccccgcggtcacaagccactttcaatgccggctccatgccgatgatcggaatgtcataatgctcgcgcaaatcgttcaccgcggcggaggtagcggtattgcaggcaatgaccacggccttgacaccgtgttcaatgaatcgttccacgatgtcaaaacttaaggccttcacttgctccggggtcttgacgccgtacggggcgttggcggaatcgccgaaatacagcacgtgctcagccggcatgtccttggcgatttctcgggcaacggaaatgcctccaagccctgaatcaaagacgccgatgggcgctgatgagctcatgccagaatcctcctacaagactgcgtaccggtacgaaatgcccgaggccggccgtgcggccagtcccacactgttcacggaaacagtctgtgaacagtattgtttcgttccctagagtactctgaaagccatgagtcttccgcaacgagtaactaagacacacgcaaccggcaatgatttcgtggtgtacctcgacaaaaccggcgatttcgagcccactgccgatgagatacggttcctgtgcgaccgtcatttcggcatcggcggcgatggactgattcgcctgaccaagcctgagttcgtgtctgatctgagcgatgagcaaatcatggctgtgcaggcaggtgacgctgaatggttcatggactatcgcaatgcagacgggtcgttggctgagatgtgcggcaacggcacacgcgccatcactttattcgcccagcgtgagggcgtggctggctccaccgagccgttccgccttggaacccgagccggcgtcaagattctgacccctcgtggcaacgtgaagccgtatggtgccaatgtgttccaggtggaaatgggggagtggaaaatcggcgagaccgacgcctatgaagtcactattcccggcaacgatggctcggcacgtggcacgttcgtcgacatgggcaacccgcatgtggtggcggtgattgaagatgccttctccacgctgccagtggtcgaggatctggatttggtcaccaagccggtggtcaacccaactatcgaatccgatcagaacgtggaattcgtgcgtattgatgatatcgaccacaacaccgcagtgggtggggcgacgatgcgtgtcaacgaacgaggctgcggagagaccctctcctgcggtacgggcttgtgcgccacaggcattgtgctacgcgccaagaccggcatctcacactgggacatcaccgtgcgcggcggcactctgcgagtggacgtgaccgacgaggacgtcaaactcaccggctcggccacgctggttgccgatatcgatttgctccgttcctgacctccctctggtgagagaagcgccagccgtgaggctgatggagggagagatacgtcgttattagccgcttatgcggcgaacagtgctgcgccctcggtgacgataatcagcactacaatcgccacaatccacagcacgtcaaccataaggtcgatgtcgaggcggtaatacttgttcaacccggccggtatctgcggcatatcggaagcgatgccgttctcttcgtcagtgaccttgcgagacggcaatccctgcacggccacggttgcgtggctcaacgccatgaactggatggtggtggagaacatcagcgtcaagcaccacgggcatagcgcgtgaatcacgaacagcgactgcgtgctcaaccagtatgagtaggccaatgctgccaagccgccaaaccatgtgcaagtggcaaaccatcgcggcacgcgcacgcgcgccataccaatcacgacaatggtaatgaacactgattcggcggcgatgccgaagaacgcattcggataggaaagcccgccgaatttcacgagttccgcctgccatgattgagccaccgtggaacaagagaccacggcatttacatcacatcccaatgaggactcaggatggcgtgccagctgcagcgtctcggccgaaagtatgaacgaggctcccaatgccactgccgaagcaatcagcatgatgagataagtccatgtggcgctgtgcctccagccagtgagccggggaattgaggcagtactggtatcgttacgtgcgccgtttgtgctgttcgtgtgcgtcatggaatcctccggtgtgggtactgcgctcaagattaaccgctgtggttgtcagataggaagagaatgttcggttttgcctggtagcgaatcgagttgcaggcatgggaggggcgaaatgaggttacgatggacagtatgactggatacgtgatgcctatggaaccgcccacaaccgggtgggacatccattgccacaccgccttctccgacggcacggagacgccggctgtgttggccgagcaatccaaggctgtggggcttaaaggtgtatccatttccgatcatgacactactgccggttggcctcaggccgaggccgcggcacgccaggtagggctgccgctactgcgcggcactgaaatcacggccaccgatgacggtgtttccgtgcatatgctcggattccaatatgatcccacgaatcaatgcatcgtggatctgttcgcgcgtactcgccaggcacgattgcggcgtacgcaacgtatggtggaacttatgtccaaggaccttccgatttcatgggagtccgtgctcgcccaggtcaaggaaggcgggaacaccactataggacgcccgcatatcgccgatgcgctggttgcctccggggtgtatcaaaatcgttctgaggcgtttgccgatgcggtcagcgcgtcctccaaatattacattcccacgccgtcgccgaccgcgcgcgaggtggttgctgccgtgaagggggctggcggtgtgattctgattgcccatgccggtgatttgagccgaaaccggagactgctttccgatgagcagattgaagcgttgattgcggaagggctggatggcctggaagtgtggcatcgtggcaaccttcccgaacagcgcgaacgattgctgggcatttgcgcacgttaccatttgctggtcacaggcggatcggactggcatggtaagggcaaaccgaatctgttgggagagaacctgaccgatgaggccaccgtggccgaaatcgtccgacgcggcgcgctgccgttataccgatagcacaaagcctccgctctcgcggaggcttgctgtaagcccttgaacaatccgtatcgtcacagagcgccgaaaccgacggcgtgcttggtctcggaaccgatgatggcatagcccagtgccttggcgggcacgatgatgtgacgacccttatcatcggtcagattgatggtttcgtcgttggctacggcctgtgcgatagccttgccgacgctgtcggccgattcctcggtactgaaattcaccggtcgtgccacgttttggatgcccagttcgatgtccatgaatgctcctcgatggtgcccgtcgccgggcggttgattgttggctgtttccagccatatccgttggttctattgtgccgcgtaacgtcggcatgagatgaccggttacgcgctcggcgtggtttccggaactccacgtgaaggtgtgtcatcctgaccgtcatgcaagggattgccctcgtcatcgtacccagccagtcctgcgcgagcgtcacgcaacgctctttcctcgcgctcaagcaagggaataaccgtggtctcagcaccagactgcgacaggcgatcattggtatcgtcatcagcctcgcccttgccggcatcctccacgttggcggaaggtgccgacgccgcctgctgatcgttcatctcaatgagctctttgagcgtgatggttaccgcgtcgtcaccttgctcggcattggcgggctgcggcttggttgagccagtgccggtcaccggactgccggcggtttgatcgttatcctcagcggcggcaggcacagccggggtcacgtctgcttctcccgcggcaacgacctcggccgagccggtacgatccggatcgggggtttcgtcggacggttccgtggtctcgttggtagtgtcgtcagcctcggcgtagcggcggtcatcctcccgcagcaaagtgccgacggtaatggtggatggggaagcggacttggcggttgcgccagcggccggagcggccgtagacggcgtagtatcacggctgataacgcccagctgatgagcgagacgctcaacctgagccttaaactgcatgatgcgatcattatccgcacgattcaatgcttggataaagtcgccgacctgctccatctgcaaccataggttggcgcgcagcatgatcaggtcatcaaggcgagagcccatcatgcggccgtatgcggaaagcaccgcattgcggtgggattcgtcaagtttgccgaaaatccaggcaagatcgcgcgcaggatcattgacctgcatatcctgccaattggtcacggccgtaatagccgaacccgagaacaggaagtcgccatctgagaagccgccatgcaccatgcatgtggagaacgaccataatccctcggtctctatgattcgcgcccaactattggtgatttcctgcggcacatgtcctgccgagcgcagacgcttaatccaggcggtcagttgcgaacgaatctggccggtggtgaacaccggatatttggcgaccgagagaaatgccgttggcaggcgatgaatagcacccaatgcagtgccgaccgaagcgcagtcatcaagagtaagcaggtcaagagagcgtgcctgtccctcgcggtgaactgcaatcatcactgcagtttcccctgtcgggccgggcttacgggcgctctgagcctcgggctgatcagcggactgcgtggtcgtcgtctgcccgatctgaggctcgtcgccgggagtgaatgcaatgacacgatccaaatcgaatccaaggccacccggctcgcgggccgaggcaagcgtctgagccgcttgcacacgccgtgtcagacgagcgcgtccctctttggtgtcagtggcatatacgtcatacagtttgcctgaggcatcctgcaccactgcctgatcgatgcccttgccctcatcggttgcgctgggctgcgtgcttccgcgcacgcccgcgatggccagattcggcaggacagccgaggtaagcgctgccagcatatagttgctacgtttcatcactcttccacactaatacatgtccggctcttcatgacgtagttttcgcactggttttcggtttcgtgccacaatggaggtcatggaacaagcgcagcagattcttgaagggctcgatgagcagcagcgccgggcggcgactacgctgaatggcccggtgcgcatcatcgccggtgcaggcgcgggcaagacccgtaccgttacgcgacgcatcgcctatgcctgcgcgacgggagcatggaagcccgagcgggtgcttgccgttacgttttcggtgaaagccgctgccgaaatgcgtgctcgacttgagcagctggggctgcaaggcggtacatccggtgttaccgccgctacttttcactctgcggcattgcgccagctcaacagtgtgtgggccgacgtctgtgaagcgccattcccgcatctcatcgaagatcagcgtgacaccgtatctcgtgccatcactcgtgctaccgctgtacgagatattgatgcactgaccgtgcgcgatgtactggctgaaatcaattgggccaaaatttctctggtacccatcgatgattacgcgcgtatcagcgtagaggccaatcgtcagccgcccgcagggttcgatgccgctcgattcgccgctatctatgatgcgtatgagcaagagaaaacatcgcgaggagaaatcgattttgacgacatcctgctgctggtatgccacatcatggatgattttcccgaagcggcggcgcagattcgttcctccatcggctggctcaccgttgatgagtatcaggatgtttctccgctgcagcatcgtttgctgaacttatggcttgggggaggcgggccggatggcaaggccgctatgaaccgcaatgtatgtgtggtcggcgaccctgcacagaccatctactcgttcgcgggtgcatccagctggcatttgttgcagttcgccgatgagttcggccttctgtctgcagacatcaacctcaacaccgactaccgttcgactcctgaagtggtgggtctcgccaatcgggtgcttgccgcggcccccaatcgtgaggattatttgaagctggtttccgccagggagaagggggtacgcatcagccgaacggcctatgacaccgatgacctggaagcacaaggtgtggcggctcgcatcgcacgacttgttgcgcagggtgcgaagccctccgattgcgcgattctgacgcgcatcaacgcgcagcagccggttttcggtgcggcattgcgcgcggcaaggctgaaattccgcgtgcgtaaggattccggatggcagtcttcgtcgctcgcggatgatgccacgacgcgcagggccctgttggaagccatgggattggacgccacaggcagtcagcagagcaccgaccccggcgtcacgatttccaccatccatgcggccaaaggtctggaattcaaacacgtctttctgatcggctgctccgaagggctattgccgtacggggcaccggaaccgggggagacgttggaagaggagcgacggcttatgtacgtgggcgtcacacgagccgaggactcgctgcatctgtcatatgcgcggaccaaggatgggtatggggcgcagcagcgccgcccttcccgcttcttgtgaacattgcttcaagcagcttttcttcggctcgctcggtgtaaataatgtgccctaagcgatggcgatgccgtcactcattcggctgttgaggattgtcgggctggtccggggtatccgggccgtcgctgccatcttcgccgagcagtttggacagttcggcatcccagtcgatgttgtcggtcttgccatccgctgcagggtgcgaggtagagctaccggcattgacggaggattgagacgaatcactcgattcggtcgcaacgccatccgcgggcttgtcaccaggcaaggtcggcagcaaatccgggtgcgaccatttggcatcacgtccgtccggcccctcggccaccgtgatcatctcccacaggccggcggcttcacgcatgcgcttagggcgtagttgcaggccgagcaggttctcgaaagtgcgttccgctgggcctcccattgcacgctcgcggcgcatcatttcgcgtagctgctcgatatgtggaaggtgagccatgccggcacgccacaccacgcaatccacccagccttcaaccatggccagcaatgattccaacgatgccagcgcttcacgctgttcaggcgtatcggggatgcctactttggtgagattcaccgctccggaaatcgattcaggatccatggaagtggcatcgcgcagttgttcttccatggcatccaaatcaatggagatgccacgcgcatacttgccgatgagtgcttcaaaccggggcatcagccaaggaaccgaagcatagaggcgggcatgggccatttcctgcagcgcaaggaaagacagcacctcggactcgggaatcttttcgttggagtcgaatccggcgaatgcttcctcgaatgcggcggtgtctgcggcgtttgcgtcatccgaggactcgacggttgtgctggtttcgctcgaatcggaattgtcaatcgtgccggcactggttgcggccgaagtgaagccaatgggattggttgtttcacttgtctcgtcagtggcttccgcaggtgcctcgccattcagcaatttggcgtattcggtggcgttctgggctatcaggccaccggcagggttcttcagcagagagataccctgatcgaagctgccatgcacttcatggctcagattgccagccgcatgacccagctgcatggcaaaggacgtgttgcccagcaatttcatgagttggccgggatccttcatgccgtcaggaatcggaatcggcactgggcctgcgaacatgccggccacttcgccgttgccaagcatgccgccgaggcgctcggaaatcaccgaggccaaagcgtcgttcatcgactcggccacgggagcggcgaatttggcccattggtcgatggtgccttccacccatccggcgcgggtgagcacatcgggctctccgggagcgggatcgaactcgcatgccgtgtccagccacagattcgcctcgctcatagcacgtcgagcggcttcaccgtccactgcggacacgctgggctgagagccggaagcgttggcctgctgcaatgcgattgatttggcgagcttgacgttgatcggtccctcttcgaccgtgcgctgcatatcgcccatggtgttcaggccgccggcactgaacgctgccatcatctgctggacttccgcaggatctggcagacggctcggatcctggctcatcatctgcgcgcgaatatcctctggaagctggctgatctgttgccaagccatttctccctgaatcgggccgaagcacttgatcagccattcgtgaatcgcgttgtcgtccatgcgtatccttctttgccgcggtgtgttatcccaagtgtaggttgtgcccgcgcccgttcgctggcggccgaggaatatgtgtgttgtgtgttcatttcggtcactcgcatacactgttgcatatgtctgtacgtcacacgaatcggcaatccgggtctttggccgctatggaggcacagccagaacacgatgattcggccgcgtcatcttccaactcgtccaaggaaaccgggcaatcgcgtttttcgcgcgccgcgcagaggatgagacgatacctggcggctcgttctccgcgtcatttcatcggcacgttcgccgtattgctcggtgtggtgatactactgttgcccagcccgtatgtcatcgaggggccggggccgacccaggatgtgctcggtagcgtcgaggacggcgcagtcattgatgtatccggcaaaggcgtttccacgtaccaagattccggctcattgctgttgaccacggtcaacgcttccggcgtgcccggctacacgattatcaatgcacaggccgtgtgggcatgggcgaacccgaagatggagatcataccaagggaagcgacggtgccagtggggcagacggccgaggaatatcagaagacggtcgacaaggacatggccggttcccagtcctcggccagcgaagtgggattggcgtatgccaaagcacacgccgatgagttgggcattgatgccgcatcgctcgcccatgccaaggtgacgatgcatgtggatagcatcggcgggccgtccgccggcatgatgtacacgctgggccttatcgacaagctgactcccgagagtgaaagtggcggcaagaccatcgccggcacgggcactatcgacaagaagggcaatgtcggcaaaatcggcggcattcagctgaagatgcttggtgccaaacgcgacggtgccacatggttcttggctcctgcggataattgcagcgaggtggcaggccatgtgcccgacgggctgcgcgatgtcaaggtcgccaccttggacgaggcctatcgggcactggtggccatcggtaaaggacaggccgacgacttgccgcattgcacggcgtgagcgcttggaattttgcggtgaaacggtcacaaagcgagatttttggtcgcgttaacgtatttgttcgccatgacttgctaatgtagcccctgtgaatcaaacggcatcgcagaacgctgaagaatttggtttcaagcccggcgacatcgtccaggagtggctctgggacgacgacgtggacgactccgtacgcgccaagatcgaggagctcacgggtgaggagcttgtagacgaggattatgactccgccgtggatggtgtcattctgtggtggcgcgatggcgacgacgaggacgaactgtccgataccatcgtcgatgcctacgcggtgctcggcaatgacggcccattgtgggtgttgacgccgaagcccggtcgtccgggagccgccagctcttccaccgtgcagtccgctgcccagaccgcaggcatgaacgccgccactccgctgactgtcagcccggactggaatggtatccgtctgcgcgctttcggcaagggccgctgaatcggaacgacgggcggaagccatggccttggcgaaaggtcatgattgtggcgtccggcgtgtgcaagtgacggctgtgccgtccttacgctattgttgacacttgcgggcaattagctcagttggttagagcgccacctttacacggtggatgtcaggggttcgagtcccttattgcccactttcactgcgctttcgaaatgaggccgaccagtgtcgagaaggccaaaaactgtgaatttccgcctaaatacacgcgagcgtcgcaacaatcacgtacagttgtggacagatttgtttatccagcaggaggtcgattagccgatggcgcaggaacttcgcgaaggggacggcaaggcaggcattgcacgtgcaggcaagcgtaagtggggatatgatcccgctcaggtcgacgcttttctagagcgggcccacactttgtacgacagtgagggaatcagactcacccagcgcgatattcaggcggtgtcgttcgacctgaccaaggacggctatgtgattgcccaggtcgacgcagcgcttaatcgtctcgagcgtgcggtggtcgacaagcagaccgcatgggagatcgcccagcatggtcgtgtgacgtggaaggcgcagactgagaacctgtaccagcagattctcgagcatgtggaacgtgagcagggcgagcgcttcaagcccggtgaggccaagcagccgtcgtatgacaagaagcaggtcgacagtcttaccgatcagattgtggataaagccgctgcatccctcggcgtcgacggtgtcaccgaagacgatgtccgtgacttggctgatctcaacgccgtttcggtgagcaatgtcatcttcacccagcgcaagggcaagaagggctatgacgagcgtcaggtcgactatttcctaaacgcgtgcgtccagttgctcagccgtattgagtcctacgctcgagtcggtggcgcttccgccaacgagccagccgctgctgcggccccggctcccgcagcagcggtggcagccccggcggaagccgtttcgccgctgttcgctgccaatgcacagcgcccggctgccgacgcacgtttcgcacctcaggccgccgcctctgatgatgcgttcgatgctttgcatcaggccgaacagaatctgtttgtgactcgtcctgcagctgagcaggccgataacacgtctgctccagcggcatatcagccggcgtcatacgcacctgcttcgtccgcagcaccgcagcctgtggtctccgatgcaccgtcgttcggagcaaaatctgcccccgcggccccgtctactccgtcggctcctgcggttcctgtggctccggcagctccggtgaccccggtagctcctgcgatccctccgacggctgagagcgattcctcgctggccgccttggcccatatggcgcaagcctcacaggatatccctgcggtgagcgtgccgtcttttgaacccaagatgccgagtctgggcacgccggaagaactgaaattgaacgatatgccggctcctgttactccggctgccgcaccggttactgccgcagccgccgctcctgcagcgccgagcgaagcccctgcagcaccggagccgccgcacgcgcagacgagtcaccagcctgcgcctgagaccatgccggtctcctttgcgccggccaacaagccggtgcgcaccaccggatccgttccgattccggttgccgaccactctgatgatgtgccggccgagcccgtgagcacaccgaagccggcagcccagcccagcaaggatgccgagacaaagcgtccggaacagatttccgacatgccgttcccctcgctgttccccaccagcgatgatttcaattcaagcattccggatctgtctttcccgacgctggatcatgatgatacgaagaaggaacagtgagcgtagtctccaactccaccgtcgtaattcttggatctaccggatccatcggcacacaaggccttgatgtcatcgcacgtcatcctgagcgtttcaccgtcacgggtttggccgccggcggcgctcatatcgaattgctggctcgtcaggccgcacaattccgcgtgccggaagtcgcggtattcgacagcaccaagattcccgtgctgaaagaggcgctgcaacaggccggcgcccgcgacacccgcgtgaccggtggatcggatgccgtgatcgcattggcaggttccggcgcgaacgtcgtgctgaacggcattaccggttccatcggtctcgagccgtccatcgccgcgctgaaagccgattcacagcttgccctggccaataaggaatcagtggtggccggcggtcatctgctgttcagcgcgcaggttcgagacgatcagatcaatccggtcgactccgaacattccgccatctggcagtcgttgcgttccggcacccatgccgagatctccaagctggtggtcacagcctccggtggtccgttccgaggctggaaacgtgccgatatggcgaacatcacgcccgagcaggcattgcatcatccaacatggaacatgggcccggtcgtgaccatcaactcctcgaccctgatgaacaagggactcgaggttattgaggcttcccgactgttcgatgtgcctccggaccgtattgacgtaacggtgcacccgcaatccattgtccattccatggtcgaattcgtggatggcgccactatctgccaggcttcaccgccggacatgcgcctgcccatcgcgctcggcctgtccgcgcccgatcgcatggacaacgtggctgccgcatgcgactggacacaggccgcaacctggacgttcgagccgttggataatgaggcgttccccgccgtccagctcgcccgccattgcctgggtgcatccgaaaagcatacggccgtgctcaacgcggccaatgagcaggccgtgcacgccttcctcgaccatcgtctgccgtatcttggcatcgtggacacggtgaaggccgtgctcgaccagatggatgccgagctacgcggtaacccgctgttcacggacgtggaggaaatgggacagattgagcttgaagctcgtcaccgtgccgatgatttgataaacaaacaatgatgaataccttgagtacggaaaaaaccgccgaaaaaccgttccgcaaaaccggtaatccggtcgaattgaccagcgaatcgccgctgcacccgcgtcgcaagtctcaccgcatcatggtcggctcggtgccggtcggtgggggagcccccatctccgtgcagtcgatgaccaacacgcttacggccaatgttcctgccacattgcagcagattgccgagctgaccgcagctggttgcgatatcgtgcgcgtggctgtgccgagtcaggacgatgccgacgcattgccggagatctgcaggaagtcgccggtgccgatcatcgcggatattcacttccagtccaagtacgtgttccaggccatcgatgccggctgcgcagccgtacgcgtgaaccccggcaacatccgtaaattcaatgaagtcggcccctcgatctgcaaagcagccactgatgccggcatctctctgcgtatcggtgtgaacgccggttcgttggacaaggaactctacgccaaatacggcggccccactcctgaagcattggtggcctccgcattgaaggaagctcacatgttcgaggacgtcggcttccatgatttcaagatttccgtcaagcaccatgacgtgatcaccatggtcgaaacctatcgtctgcttgcctccaagggtgactggccgctgcacctcggcgtcaccgaagccggtccggcctggcagggcaccatcaaatcctgcctggcgttcggcgcactactcgccgaaggcatcggagatacgattcgcgtctcgctgtccgccccgccggtcgaagaggtcaaggtgggctgcaagctccttgaatacatgggattgcgcccgcgcaagttcgacatcatctcctgcccgagctgcggacgagcccaggtggatgtgattcagcttgcctcggccgtgaccgaggggctgaaggacgtgaccgcgccgattcgcgtggccgttatgggttgcatcgtcaacggccccggcgaagcccgcgaggccgacctcggcgtggcttccggcaacggcaagggacagatcttcatcaagggcaaggtcatcgagaccgtgcccgaagaccagatcgtagacacgttgcttaccaaggcgcaggaaatcgccgcccaaatggaggccgatggcctggttcccgtcaacgccaccggtccggtggtggttcccattcagcatcccaatcgctgaatgcgccccacggcataattaccgtggaacggctacaataacctttcgtgccacaagaagagcagcgtctgaccgtgaaggccaagccgtggaccagcctccaccggctcatggtcagtctgcccatcttcatcatgctgatgggcgtgctggtctctatctccaatctcactaccgtgccatggaatatcgagcccaccggccaatccatggccacgcttaccgatgatacggacgtcacttttgccaatccgaccggcgaagcattgcccagtaaaggcacctatcaggtcagtgaacggtacatcaccctgaatatgaccagcgacggcaacctgactcaagagaccggagtgcgcggcaaggccaacaagaacggcgtgcagaccatcaaggtgcttattcgcgagccgcagggagctgccggcaaacgaccgggtgtggtgttcatgcacggtgccggttacggcacttgcgataactcatttggcgatgtggcctccgacatggcttcagccggttttgtgaccgcagtactcgataaaccagtttggaacaccaccgacgtcaaccgcgactacatggcctccgccaaagcctatgatcaggtgattgcatatttgcggcagcttgagaacgtcgacaatgccaaggtcggcatttacgccacgtccgaatccacttggatatcctcatacctgctgcaggatgacccggatgtcgctttccagattctcttgagtccgatggtgttcagcccacgccagtcgttgggcttcttcgtcacccaggactttacgcttgccggtgcgaatgatggctatcagtccattgtccagcgtgtgttcagcgcggacaccgatttgttctcgctgacgaatttcgatcttgatacgctcaaacctgccgcctacgccgttcccacttttgtggcctatgggtcgaaggatgtgatgaccgcacaggtcgatggtgtgcgtgcgattctgcacaacgcgcaccaggccaacaactgggatgtgaccgtacgcagttatcccgtggccaaccacgtgctccgcttgggggacgagtcggaggccggaactccattcgcggatgcctatgtgaatgacctgatcgactgggcggtaggtaccacggcaggctatacgcaaaccagtgaacgcgtggccggcgctggcctgtaccagtcgattgggttgccgggagcgttgaaagcccgtcgggtgggaaccatatacggcgtgatcgtgcatgtcgccgttgtgctgctgcttatggcctcaacgatattgggattggtagcgcttggccgcaagatcgcgttgaacgcacagtggcggcgcaatcggagggaggccaagcgggctggcatgctcctgcctgtcaagcccgtggtattgggtttcgcccatggtttcggcggatcgttgctgacgcttacccttaccacgctggccgcgatgctgatcttctttgccggactaggccaagtgattatgggcgtggtcaaacttgcctggggtggcgcgcccacggaaacgcccggggtgatgtattggagctggccggtgatccaagtggtgtctgtgctggtggtctgggcatggtctcgcgtgttcatgaggcttatagaggtggcctggcatcgtggccttatccagttgccgcccaggcgcgaggcggttcgtaatatcgtcaccggtgccgaaccggtgctcgcctccactcgacttggccgcgtactgttctggctggtggcgttcactatgctgaacgtgttgttgttcttcgcgttctggggtctgttcgtttactgacatatggcgcaaacgttgcgaaaggagggatgatgccgctgtaccgagatgaaggcgtggtgctgagaaccgccaaacttggtgaggccgaccgcatcatcaccctgctgacgcgcgagcatggcaagattcgagccgtggccaaaggcgtacgacgtactaaatcacggttcggggcacgccttgaaccgttcatgcgcgtggatctgcttattgctgagggccgttcgctggacgtcgtttcacaggctgaatccgtcgcttcgtatggtgccgcaatagctgccgattatgcggcgtacgaggctgccaacgtcattgtggagaccattgataagctcgtcagcaccgagcatgagcaattgccgaaccagtatcggctgcttatcggtgcattgaatgcgctcgccaaacatgctcatgcatcgcagaccatcagcgagtcctacgtgatgagggccctggcgctggccggctggacgccgcgtctcgccacttgcgtggtgtgcggcaagcccgagcgccgttacttctccatcgcatcaggcggtgtgatgtgcgaggccgaccacaccaccgatgcccgacgtatcgcgccgcttgtattgagtcagcttgatgccctgattcgaggcgactggtcggtgcttgataacgcgccattggagcgtattgtgcaagagttggttgaagattggggggagtattacctcgaacggccgattcgttcgctgcgcttgatagattcatgagtatggcttttgagaacgttgattacacgtcgttggacatccccgcagctccgttcagcgacccctcccgtatccctgatttccccaaaaacaaagtgccccggcatgtgggtgtgattatggacggcaatggccgttgggccaagcagcgcggcatgatccgcaccaatggccatcaagcggctgagccggtggtgttcgacaccattgccggtgccatagaggccggtgtgcgctatctaagcctgtatacgttctccactgaaaactggaagcgatcgccgcaagaggtgcgtttcctgatgggcttctcccgcgagattatccatcgccgagtggcgcagatggatgaatggggtgtgcgtgtgcgctggtcgggccgccgtccgaagctgtggaagtcggtgattgacgagcttgaagtggcaatggaacgcaccaagaacaacaaggtcatcgatgtggtgttctgcatcaactatggtggtcgtgccgagattgccgatgcctgtgcagccattgcacgagaggtgcgtgacggccgaatttccggagaccgcgtcaccgagaagatggtggccgatcatctctataatccggatatccctgattgcgacttggtgattcgcacttccggcgagcagcgtacctccaacttcctgccgtggcaggccgcgtacgccgagctggactttgtacctgaactgttccccgactgcggccgtgaggtgctctggcgcgccattgataactacattcaccgcgatcgtcgatttggcggcgtgaagtaaagaacagccctgtgggctgttcgttcacgccgccgagccgggcgcggtagtgtgcggctcggtgtgttgagtccggcgaagccgatcctaattgctggggcgtgaagtaaggaacgagctactcgctgatatccgcgtcggatccattgccgagcagcagccattcgaccagtgaaatcagccctagcagtattgcggtttcggcgatcaccactacagtggcggagaagatcagcggagtgcggaacgaattgaacgcggcctgcagccaaatgcccaggccgttcattgcgcccagatattcggcggtggccgccgttccgaaaatgtaggcggccgagatgcgaatgccgccaaagatctggcgtgcggctacacgcagcttaacgtgccagagtgcccatgcacgtgtggctccgcaggtcagtgccacgtcttcgtaaaattgcggcacggcggtcagtccacgggcggtctgcacggcgatgggaaatacgccgaacacggcgacaataacgattttgcccagtggctcgaatccgaaccaaatcatgaacaacggagccacggtaattaatggaatggtctgtgcggccaccagcagcggatagaacgcacggtgcagggttttggataggtacagcccgatgccaatgagcacgcccgctacgatggcgatggcaaatccagtgagagcctcatatgtggtgatggcggcggcatccatcaaatccggccaagtgcgcaccatggaggcgatgatctgggtgggggaagcaagtacacgttccgagacatgtcccgcgcgtacggccgcctcccacaccaccagcaacaggccgatggtaatggccggtggcgctatacgcaccaaccacgacttgagattgttcatcatttgccttcgaaatatataaatggctcccctcaagaatgaggggagccggcctccctacagtcgctcagtccacgtagtcgttagtggcgagttccttggcctgcggagcctgcttggggttcttgccgtccttgtcctggtaggtgccggccttgtactggaagtcaaggtaaggctgggcgtcatcgaagttcacggtgccgggcagcgacttggcatcatcggtggtccagtagccgttcttgacgatctcttccatcgaggtacgggtcagcttggaatccagctgggcttccttggcctgtgccacgagaatatcggcggccttgtccgggttggacagggcgtagtcgtagcccttcttggtggcggagaggaacttcttcaatgcgtcggcgttggcggaatccttgagccaagagcccttgaccgcgaagccgagctggtccgggttgccgggaacgccccaatcggaggcgacgaagcagttgagcgccgggccgttcagctcgctttccacaccctcccaagtcacgtagaagccgccgaagtcacccttgccgctagtaagggtctcgaaggtgttcgtgccggcggtggcggtcttgaattcgccggtgccgcctgcatccttaatcatctcacgcaccacggcgttctgctctgccgagccgaagctcacgaaggttttgccggacaggtctgccggcgtcttgatgtcggtacgggaggccaatgcgcaccagcgggccacgggcttttgcgtcagatcaaagacgaatttcagatcggagccttgcgagttgaatgcggccacattgctcagcgtggtgaaaccaacgtttgccacaccgttctccacactggtttccgcgccggcctgagcggtcggcagaatcttcacgttgactcctgcgtccttgaagtagccgagcttctgggccacgtacaggccgatatggttcgtgttcggcgtccaatcaagcatgaacgaaacggtgggtgtactggaattgctggaatcggcggtgttggcgttgccgcatgccgcaacggacagtccgagcgtggcggctcccaacacggccaccatcctgaccagactcttcttgacttcaatcctcatcttcatgtcaccttgccttctgcgcataatgcgctcaaggtctgatgcatcgtaaagcggaaaggtgaggagcccgcgcgaaacatcaaaccgtacgccacgcacataagcgagggcgtgtattccaaatgatatcggcacggttgctgccaccaaccgcgcgaacgactcaccagtatagccgtatggctggaagcgcaagcatgctgctttggtctcgaatcgcggcaagggtcggggttgccacgctctatcgtagagagatatgagtgtgcatttctcctcccgagtggatatttccggtccgaatccgattgcggccgccgagactgcggccaaggcaaacggtactgcgctgggcaagctcaatgattccaatccgacgcggcatggactggctcccgcactggtgccgagcgtatatacggccgatccgcgcggatcgtacgcggttcgtgaagctctggctgcattcctgaacgaagccagagcgggccgctcccagatgaacgcatcagcgaataccgccagcaggggcgtgaagccggagcaattgtatgtgttgagctccacatccgaggcatactcatggctgatcaaactgttatgtgatgccggagatgcagtgctggcccccaagccgggatacccgctgatcgagtcgatcgcccggcttgaatgcgtggataccgtcgaataccagttgaggttcgacggctcttggttcattgacgtggccgagctggagcaattgcttgacggaccgagcggcgctcgtattcgtgcattggtactgattaatccgaataatccgaccggatcctatgtcaagtcggccgagcgggaacgtatcgtgacgatgtgccgggagcgaggcatcgcccttattgccgatgaagtgttctttgattatgcccttgagccatttgccggcaacgtgcgtttggccggagagcagggtgtgcttacttttgcgcttgacgggttctccaaaatgctggcggcgcctcatgccaaagtcgggtggattcaggtgtccgggccggccgaggatgttgcgcaagcccagcgccgacttgatgtcatagccgacgattacctgccgatgagtgacatcatcgcacagcggattccggcgctgttggaggccgcgactgagcaaaccgcgcgtgtggaggaacgagtgcgcggcaatctcgcgattttgcacgagctgctggatgcggacccgaatgggttggtcagcgtgctgcgagccgagggcggctggaacgtgctgctgcgcgtgccgtccgtgattgacgagaacgagatggtgttgaagctcatcgccgagcatggcctgaccggacagcctggatatttctttgatatgacctccaacggctatttggcggtttcgctgctgcctgagccggaagtgtttagacaaggcatttgcgccgtgctcgccactgtggaggcgttgctggcataatgggcggcatgggattcttttttcagtccaaagagctgccgcgcccggcttcgctgacgttcaccttgaaagaagccggccatacctatgatgatgggcatgttggccttgcgcccaccatgctgaccatcagcgaacagcgcgtggctgtgatcggcctgaatggagctggcaaatccacattgttgggattgctcgatggctctcttaaagccaatatcggcacagttacggtgtccggcggcagcgaacaactgaacccagccgtgaaaaaagacctgaagcgcattgacgaccttgtcggtaaagtgcgtcgcgaggagattccgaacagcttctaccgggccgcgaatatctccgaagcggtgtccgaagcactgaaaaagcacaaggtgccggaatccgaacgccatgcgcgcatcggcaatctgttcgcgcatttcaatctggcacaggtctccaaggccaaggccagcgagcttgactccgagaaacgacatctgctggccattgccgccgcattgagctttgagcccagtgcaatcgtggctgacgagcccagcaagggtttggatgagattggcaccgcacacgtggccaaggcattgttcagctacaacacgcaggtcatcttcgccacgcatgacacggatatgattcgccggcccgaatacgcaatcgaccgcgtactcgtactggacgagcacgcggtcatgtgcgatgacgcgccggccgaagccgtggcgttttatgaggatctgattcgacgcaagtacgaggcctccaagcggtaatgctcccccctcagtcacctgcggtgacagctcccctcagagaggggagccaagggtgtgtcgcttggtcgcaggccgatgccgctacgcgaaatagaacccccggaagccgtactcatagacgcgatagatttgcgcgttgagccgctctacacgacgttccttgatggaggcgctgacatcatcctgcgagaacaggcataggccaatggcgatggctgctgcggatattttgaaaacacgacttcgggcggcagtagacacagggaatcctcatggtactacagatgaacaacggtgaattacatcacatacactatgccgcgggtcttggagaaaactgcctgcaatactgggaatatgctggacggccggtagggtgcgaccgtggcctggctacagcagcgtaaaccaggactgaacctggtgccacagcgcggcattattcgtcagcatggcgtcatcgcgggcgggagcaaagcaccctagtatggcgacggccaacgtccagatcagcacgatgagtacggtccatcgcatcagccaacgccatggagtgacacgggcgatgccgtcgccggatgcggcgtcgttcgcgccggccaacgaggtgctgggctctcggccgttgactagccacagcagtcccggaatcgaagcgagcgccaccagccagccgaaatcagccgaatatcgccagcccagaccgcccacataactgtcgaacaccatcagtacgccggccagagccaaacaagacatgagccaacgacgcatgccatgcatctccagcttatgcaggaacggcagcactaatgcaagcagcatcagcggcgtggcggtgaacagtgcgccgaccatcacctcgtaatagccccaaaccggcattggcgcgggggagaccgccagccacgggaagtttcgtacaaatcgcaccggcaggaacaggtaataccagacggtggccggcatgtcggcaatcggggtggcataacgggtcatgtcggagacggtgaattggtaggcgttgccgaagtcggtcagactgccgaagcgcactttgttccacaacatcagcggaatgaccacaaccaatgcaggtatcaccatggcaagcggcgcgcgcaacgctttgagcatggtaatgcgtcgatgcgcaagatcgctgatcatagcgcggatttgcggccagaacagggcgatggccagcagggccgtgagtgcaaaggtcggccggcaaccgaagttcgccgcgatgcatagggcgccgacggccagtcgcggcaaagacagtggctgtgcgtcgccggcttgccagcggtcggacggtattagtgggcgactggatgtatccgcacccagccagaaccataatcccagtgaagtcaacgccagagaagcggcgaagggcacttggtagaagttggtgcggtaagccagatagcccacttgcgccccgagcagcgcattgacggtgatgagcgaggcggcggccaatgatgtttttggcatcacgcggtgaatcacacgcagtacgagcagggagaagaagatgataaacagcagcaccaggaactgttcggctgcggcggtcggcaacatttgcccggtaatcagacgatacggcacgaacagcagcacggcaggcagcacgccgaagtaggagtaccagtggccttcgtaataggcgtaatcccaatacatcgggctgaccccatcctccaacagtttgagacgagtcggcacatcataggggtgagtgctttgggccagttgtccgggtacgtcaaggtcaagccatgggcggcctgcgattagggaatcggccacatgaccgtactggtcgaagtcataggtgtagccgcctgcggtatggaaggcgagcggcatggcatgcgtgagctgccagatgatggaagcgccgatggccagtgtcggaatcgccgcaatggccgcgaacgccagccgctggcgtgtgctggagggatcaaacgtgatacgccacaatcgagagccgggcctccatatggcgaccagcaacgccagcgcggccattgccgcgacgcggatccaatcgatggcaaaaggcacgtgcacgttcgcgcgtgcgtcggtgatcggcacaattgcgccgcgttcctcctggatccagatgcgtacggtgcctgcacccacagctttgacataatggctgcgtgaggtgccgggattcatcgaaatggcttggccggtactgccgttcacatccacgcgcacatggatggtgtccagtggcttgaacaccgccttgtccccattggcccgtgattcggcctcggcctgttcgtgaaccgcatcgatggtgtcgtgcgagggggagtcgatgcgcagatatgctgaagtgccgtctgtggccagttcgagatatgccttggtcggatcggtgacggtcagcatatcgtcatcggtgcgcaccaggcccgggcccaaggtgttatgcacggcgttggtgtcggtgctggcccccagcgtgcgccagaatggcaggttgaaaacgatgcactccatgccggcgataatggccgcaacagccagtagcgccgcaagcgggcgccacgacaatcggtggcgtacacgactggtgagatgactgtcttcggaatgcaccccattattctataggctttatgtctggcaaacagtagagaatgtgaatcatgccaaaacgtatgtcgaatcacagtgaacgatccggcccgtccttcttgagcgggctgaaggattcgatgaatgcgcttgcctccgatctgggcttatccaagcctcgtcaggccagcaccaacccgtttggcgatgcgttgagcgaggccagcgagcgcaagggcggcatcatcgatgaactgaccaagcatgcggtgccgctgagcccggtggtcaagaggcgttcgttccccgccttggaaaatgttcccgagggactggtgctgggatgggcgcaactgccctccacgcgggggcgtggattctccttgggtatcttccccgatcgggatcactttgcgcaggtggcgtttgccgatacccatggtcgcgtgtttgtgggcgccgatttggatatggacatccaggatatgcagccgcgcttcatgttcggcaaggaaaaggaagtgaccctgccgaacggtgagcggctgggccatgatatggggcagacccgtcgcaatatgttgggccgtgcgattcggaacaatggcgaggtgaaggccatcaccggaggcgtgatcgggcgtgacgacaccgatcgtatgacgtggctcgcctcgtggcttaaggccggcaaccggtacaccttggagcagatgcgcgccaatctgccggctgatatgcgtcatgatctggaataccgtgatgccgtggccattgcgttcttcgccgcctacatgctgccgcaaatcaatgggctgttgataggttttggttccggcaatattttccgccgtctcaatcgcgaggctcccatcggtgcgatcaggcgttcgattcgcgacacgatggaggctcgtgcgcacggtatgcgtgcctctggcctggaggatcattttgcggatctgatgcgcgaggccggggctttggataacacgccgggcttggaagccgtgcatggcgccgagccgctgcatttgtatacttcgacgtactcgagcggctatttcttcacgtgggataagtcattggccttcaatcaggcgctgaagtccctgaaaatcgagggcaatctcaatcgttttgccgcggtgagcgcctggctggagcgcaattcctcgcgtgggctcaatcccacggaagacacggtgacccgtgccgaggccgcgcagatcgatatgaagctcatcgaaaaccccgcgattatggcgctcaacccgtatgacggatccgatgaacgccgtgcggtgctgagcctggtcaatgcggccgagcacgccgcagaccggattcgtgaggagttccccgacccgaggagtgcaacgcctcgcacggacgaatgggtgtatcggcagacattgtcgtccctgctgcgcagattgcgtctaccgtatcggtttgatgtcgagtttcgttcccgactggattcgggggaagtggccatcggcttcaccacggcgggcacgtcgatgatgccggatagcagatatgacaccgaacggcgcacgtggagaacgctgagcagcgtcgagcgcgcatcgatgagcgcctcctacaacttgcgcgtcggcctgatgatggcggcgctgagcttcggcaccagccaagccgtgcatcaggtgtctctgcacatcgattccatcggtttggaagaggcgattgccgagcaggactcggccatcgaagagatgatgagcgaggcgttaagcgctttcgagcatttgcgcagcggcgatttgggacgtgtcagttccaaggctgatcccaaggatggcgatttccatggcgatccgacccggccgatcacgcatgaggagacctttgggcagccgcccactggcaccggtgatgagcagcctgcaacggacgcggagacggatggggcgggctcgtctcagcagaatgccgaagacagcgacgacagcgcatccatcgactcccagttcgaagaccttatgcggggcatagatattgacgagatggctttcggcatggcgtcggatgacggcaacgaaaccgagaatgcgggtgcgggtgatgatccgatgagcgtgctgcgccgtaaccccaccgtgcgcaacatggtcaccgtcacattcgccagggatgccttcctgcaacgtctcgacaccgatggtcttgaccaccctgaagaaacctaccggatgtttggtgcggtgatggatgtcgacggcgagggcggactcaagcccatcaacgccgacttcgacttggccgatagccggttctcgcccgttggctcccaggaggagccggaacttgccgaccgtcagttcaacgcgtcgaccgcgcgagtactgggcgcgcagaatagcgctggtctggcgattcagcgtgtggacctgctgcagcatggcgtcaatgcgttccacgacatcgcccgtaatacggaacttgattccgtggagaaagcgcagcgggccatgcaaatcatcgaatccatcagcgatcccgaactgacgggtctggcctcgcaggtcaccagtgcgctgattgatggcaacgatacgccggactttgccttcactcttgccgacgagctggataaggaacgtctgcgcgctcgcgatctgctgttctccggacaggccgatcaggccattgagatggccgaagcggctgcggcccgtatggaccagacctttgccatggggcctggagtgccacgatacttcaattcctatgccgaacgagtggtgtataaccgcctgttcaccacattggatgagcgcacggttctgattccggacaatctgttctatgcacatatggaactagctgatgtgctgggacagctcaaaggcgccaaagccgcgattccacacctgaatcgtatggtggcctacgcgcccgcctatccgctgtcgcacctgaaattggccattcaactggcccgcaatgaggattgggattcggcgcgcgccgcctgcctgaatgccttgcgagtggctctggatcgtgatgatgcggcgttcgcctattaccgtttcgcctatgcggagtggatgctggaccgattcgatacggctgccgcagcctacatcatgagcgaccatattgcacctggagcaatcggatcgctggagagcgagttacaggagctggtctcccgagccgattcgcaatgcatccgtgtgccggaatcggtggagagcgcggcgcaagtgctgtcttcgcatgatctgccggtctggccgcacattgaagtggccgatatcgtgcgtgatgccgctcgtgtatgcgtcgatgagggcatgtttgtgcctgcccgcacgctttcggtggctgttgcccgtatgaatgatggcgaaggcgacaatatcgacgttatccaggcccaattccttcgttccctttctgcgtagccgtttcagggggagttcgcccgctaggatagacaatcatgagcacgaacgaacagttggcatgggatttcgacgatggggatgcggccgagatccggcccgacgaaggcgttacccgctttgcccccggttccgagcagtgggtggccgcgcttgacgccaccgatgatgacgcgatgcggctcgatcgtcttgacgtcaatacgctcaatgccgaggtcgcggcgcgtctgtgggctcgtgtggccgcttgggtggaggccgaccagatcgcctactacatcgatgatgcgcccgtcagctccgatgccgcctatgatgcgcgcctgcgttgcctgcaaaagcttgaggcggcgttcccctcgctggacaatccacagtcgcccacccatcgagttggcggctcgttctccaacgatttcacttccgtgcggcatccaagccgcatgatgagccttgatgatgtcttttccatcgaggaactcaaggactggtacgattcggtgattcgcgatctcgattggccggacggcaagccgttgccaatgagctgcgaggtcaaaatcgatggtctggcattgaatctcatctatcgaggcggcgtgctggagcaggggctgactcgtggcgatggcgtcaccggtgaagacatcacactgaacgtgcgcactatcggctccatcccggtgcagcttggtgggcctaaagaggatattccggacttcgtggaaatccgcggcgaagtgttcatgcgttgggatgattttcatacactcaatagcgagcaggaggatgcaggccgagcgcttttcgccaatccgcgcaacgccgcagccggttcgttgaggcagaaggatccgcgcatcaccgccactcgccggctgagcttctatgcgcatggtttagggcagcttacttggggacctgatcatcctcgtagcacccatgacgtgatagccgaccaatcgcaagcctatgatttgtatgccaagtggggcgtgccggtctctcctcacaatcgttcggtcacgtccttccatgagattctcgacatgatcgattactacggcgagcaccgcggtgatatcgaacatgcgcttgacggcatcgtcgtcaaggtcgatgaccttggcctgcaacgcacccttggcgccacttcgcgggcgccgcgttgggccatcgcctataagtacccgccggaagaggtcaatactgagctgctcaacatcaccgtgcaggtggggcgtactggtcgtgtgacgccggttgcggtgttgaaaccggtgtatgtggccggttccactgtggctcgcaccacgttgcacaatggtttcgaggtcaagcgcaagggcattctcattggtgacacggtcgtggtgcgcaaggccggtgatgtgattcccgaactggtcgggccggtgctggagcgtcgcaaggagcgtgagagcgaactgagagaattcgtcatgcccgagttctgcccgtcatgcggcgcgaaactggctcccgccaaggagggcgataaggatattcgctgcccgaacgtggaaagctgcccggcccagctcaccgagcgtgtgatttcgttgggctcccgcaaggccttcgatatcgagcatctgggcgagcagtcggccatcgcgctgaccaacccggaggagaaccgtcccgattctgtggcgacctatgcgccgaatatcacggagattctggtagctcccggtgaggaaccggacccttacgagcctgcggctggtctggaattgcctcccaagcaaacgcctgtgctgtccaatgaatcaggcttgttcgctctgactgtcgccgatctgaaagatgtgcaggtatggcgtgaggctgcgattgtcgaagtgcatgaagtggccgatgccaacggcaagaagaagaaagtgcgcaagcgcgtgggcggctctggcctgtggcatcaggtgcccgctttctggacggctcctacggcggccaagagacttaccgccaagcagttggctgagcgtgcgcaggtggcgactgctacggctgctgaggagggaatcggaccggctgtagtgcagtcggcacaggggagtgcgtcaggcatcaggcccggctcatctggcgaagccgcggttttgcctgatgcgaagccggcctttgtctcatcgcgctacccggaatatgacgtgccagctgatgcggttatcgttcgcgtcgaccacaaaaccacgcgcacgggcgtcaccgatgtgccggtgtatatcaggcccggcgagaatacgcgcaagatgttcgatgagatggacaaagcccgtcacgcggacttgtggcgtgtgctggtggcattgtccattcgacggctcgggcctcccaccgcgcgtctgattgcctccgctatgggttcgttgggcgccattgaaaacgccacggtcgaggatttgaccgccatcgatggcgtcggtccggaaatcgccgaatcggtggtgaactggttcgccgcggcccgtgaacccggagactggcgtggcgagacgttgcgtgcgtggcaggccgccggcgtgggcgttgacgtagcggagaccagtacgctgccgcaaaccttggcaggtaaaaccgtggtggtcaccggttccttggaaggctattctcgcgactccgccaaggaggcaatcattgagcgtggcggtaaggcagccggttcggtgagcaagaagacggattacgtggtggtcggcgaaaacgccggctccaaggccgccaaggctgaggaactcggcatacccatgctcaatgaggctcaattcgcccaactcctcgaaaacggtagcatctgatttcttggctcccttctctgaggctgggctgtttgtagatgaagagcgaacgacagcgagccagaggatgcgaacgaagtttgttcataattgcggatgagctgtcgcatcagacgactgaggagagtaaccattgcgagccaaggagtgaattctcaacgcagtcctgccccagtgtgacttactccactctctctggcatgccgccgcaacacacgctagggtagtacaggttcttaaggaggatacggatttatgaacgacgcacgtcagatcgaagccgagatctatgaacgcctgagcaaggtcatcgaccctgagcttggccgttcggtcaccgacctcggcatgattgccgccatcgaggccacgcctgctgatgccaacgttgacactgatgcctatgacgtcaccgtgcatgtcgaactgaccgttcctggctgtccgctgagcgaaaccattaccaaccagatcaacggcgcagtgagctcctatcctggtgcacgcctgctgccccatatagaggtcggttcgatgagccgcgataagctggctgaccttgttgctgatctcaaggccgaacgtaaacagaacccgttcagcaagcctggcgtcaaaacccgaatcttcgccatcacctccggcaaaggcggggtcggcaagtcctcggtcacggcgaacctcgccgccacttttgcggcacttggctatgacacggccgccattgacgcggatatctatggattctccctgccgcgtctgttcggtgtgcacacccagcccaccaacctgaacggcatgctcatgccggtcaccgcatggggcgtaaagctgatttccatcggcatgttcgccggtgccgatcgcgcgattctctggcgtggtccccgtctgcagcgatctttggaacagttcctctccgatgtatggtggggcgagcccgacgtgcttttgcttgatctggctcccggcaccggcgacatggccatctcggtggcccaggcgttgcccaacgccgaactcgtggtggtcaccaccccgcagccctccgcctccgacatcgccgtgcgttccgggttggttgcgttgcaggtgcccatgaaggtgcgcggtgtggtggagaacatgagctactacgagcataaaggtgagaagttggagattttcggcgcaggcggcggccagcgcgtggccgagcagctgaccgccgcccttggctatgacgtgccgctgatggcccagctccctctggaacccgaggtgcgcgagaccggtgaggccggacgcccggcggtcctgacctccgagggcgctctgcgcactgatggcatcggccagaccttccggggccttgccgagcgccttatggcgctctgagttgcgcaacgaatgattctcgataagaaaagtgtgagcctcacatacttgtaatcgcacattgagttgtacgaatcatctattggtggatttcagacatcgtcgatgtcaggtgacatacattccgatgaatttcctgcgcaacaatttctcgaaataatccttgttttcgagaaattcttgcgcttatgtccaattacgtcagaggaatgcttgttatcctcatgtgcgtttgggcgataatgtgcatttggctcacacttttcccgcagcgaaccattttgtgtgagtgcatacgggaagacccccgaccgcagaagcggttgggggtcttcttgatgagtagtagaactcagatgtggaagtagagctcgtactcgagcggggtcggagccaggcgagcctggtcgatctcgtcgcgcttgaggccaatccaggtctcgatcaggtcgtcggtgaacacgtcgccggcggtcaggaagtcgtggtcctcttccagggcgtccatagcctcggccaaggagctcggcacctgcttgatgccagcgtgctcttccggcggcagctcgtagaggtccttgtcgaccggctccggaggctcgatgtggttcaggatgccgtccaggccagccatcagctgagcggagaaggccaggaacgggttgcaggatgggtccggagcgcggaactcgatgcgcttggcagccggggaggtaccagccagcggaatacggatggcggcagaacggttacgagcggagtacaccaggttgaccggagcctcgaagcccggaaccagacggtggtaggagttcagggacgggttggtgaaggccagcacggaggaggagtgcttgatcagaccaccgatgtaccagcgagccaggtcggacaggccagcgtagcccttctcgtcgtagaacagcggcttgccgtccttccacagggactggtggcagtgcataccagtgccgttgtcgtcggcgatcggcttcggcatgaaggttgcagccttgccagccagagcagcggtctcgtggacaacgtacttgtacttcatcaggtcatcgcctgcgtgctgcagggtgttgaagcgatagttgatctcctgctgaccagcggcggccacctcgtggtgggaacgctcgaggatcagaccgaccttctgcaggttggcgaccatgtcgtcgcgcaggtcctgggtgtggtcgatcggaggaaccgggaagtaacccttcttgacgcggttcttgaaagcgatgttcggggtgccgtcctcttcggtgtcgacgccggagttccacggagcctcgatggagtcaacctcgtagaaggaacgctgcatggagttctcgaagcgaaccttgtcgaagatgaagaactcggcctcaggggcgaaggaagcggtgtcggcgatgccggtggacttcaggtaagcctcggccttgccggcgacctgacgaggatcgcgggagtacggctcgtcggtcagcgggtcgacgatggagaaggccacgtcgagggtcttgtgcttgcggaacgggtcaacgaaagcggtctcaacatccgggaccagcttcatgtcggattcgttgatggcctggaagccctgaacggaggaaccatcgaacggcatgccgtcggtgaaggcgtccttcaggaattcgctagccggcacagtgaagtgctgctgaacgccgataagatcggtgaaacggacggagacatactcgatgccttccttgttgataagggcctcggcgtcttccttggacttgagttcggtcacgggaccgctcctttcatgtggaatataacggtatccatcgtaaaatcgcgcgtttcgccggctcgaaacttgggttacgagaatgtttcgtgactatggacagcagccggcaaagcgcggtattccaaggaaacgtcattacggaaaggaaacgtgaccaatcgggtgaatgaatacggacgtccgcaacgtggacagtgggtattgacagatggagatgatgcttatagggacgaatataagagaatccccgccaacccaggaaagtcagcggggattcgttacggaatatgcggcagtctatcagcggccacgcattgcgcggcgggagatcttctgcgggcggttcggatccatgcccttggggatggaatagcccttcttggactgcagcgtgtgcaggcgctcgttcagcgttgtcgtctcggccctggtcagcaggaagcggcggcgcgggtgaatcttggctaccagcgcgttcttgtgattggtgggctcgtagctcttggctttggtcaccgtgctgcgcagcttgtccagcggcacctgcttggggccatgtcccacggcaatgcggtacacgggaatggtggaaccagcggtgactcccttgatttcatgctcttggcggtccatggccttcatcacgcggccgtactcgccttcgccgatgagatagatgccattcatcgaagtgccgcgccaaatggcgtccttggtcttcgggtcgatccacaccggctcctgcgggaagtcgaaaccggccttctgcatgttgctcagcacgccgattgcggcgccgggcttgccgtcgatctgcttatagccgaccttgtccgcacggcgggtgagcagcatcgtggccagcaggatgccgagcatcacggcggtgatcatggtgaaaatccaggtcagccaggtccacttggcaatcaggccgataatgaccatgatgaccacgggcagcaggaaagcgccggcctcgagccacggcagggccttgtcttccttggccgtgtacttgtaaatctggatgatctgcttgattgtgctctgcttcttgggcttagcgtccttttccgccatcacttcttccttttgctgggacgaaacacactgggcaatatcgtatcaggtgcgctggtctggctcagcgcgtgtgcagcggccgttcgtcggccttcagcagcgcctcgccgagcgtttcactgaatgtggggtgaggatggatgagccgggccgcgtcagccagcggcaatcggttaccaaccaattgctcggcttcggagatgatgtcggaggccacgggagaaaccatgtgcacgccaagtacccgtggagtgtcagggtcggcagcatcgcagccggagacgatagtcagtgaaccggctgtgccgctcatcaacatgcgggcattcgccagcattgggtagatagtctccttgacctcgaggagattctcacgtgcctgcgcctgctcgatcgtcagccccaccgatgccgcctcgggtgaggagaacacgatttgcggaacggtgttctcgtcaaccggcttgggattgagacccgcgatggtttcggcgatgacgatgccctgttcgaatgcgcggtgagccagtgcatggcccggcgtcacatctcctaccgcccatatgcccgatttgttggtgcggccaaacgcatctgtgacaacatggccgctctccgtaagtgcgacgccccatgatgggtcagcaactggtgtacgtccaatggccgccagtgcaatctcgccccatacggattgttcgccatcctgcccttcacgtgtgtaatgcacggtggcacccagattagcgccggtatccacatgggtgacgatggtatgagtgatgacgttcacgccgcgacgcttgagctctcgggtcaacgttgtgccggcgcgacgatcccacgcggagagtacgcgattcttgcgaatcaacaacgttacctgtgaaccggccgcgttccacatcgaggcaaattcgagagcgatcgctccagcgccgataatcacagcggatgaggggaactcgttgacttccaatgcctgcgtggaatcgatgagcgcgccggcgaacggattgccgggcagcggacgaggcttggcgccagtggctatgacaacgttgccggccgccagatcgagactagcgccggtcggctcggggacgtccgccttgtgataagtgagaatctcggtttgcccaggggaagggacgagatgaacaatatgccgggcgttgtctgctgcatcggtttcttccgcattgaaagatgcatcggcgcgcagcacagtgatattacggtgcgctaacagccccgtcaaacctttgaccatggtgtccaccacgcgcagccggtaatcgcgcaaagtgccgaagtctatgccgttcaccgaggcgttgacgccgagttcggccgcccgatgcacggtgtcgatggtgtgcgtggcggtaatcagtgccttggaaggaatgcagccgcggttcagacaggtgccgcccacggtggcgtcgcgctcgataagggccacactcatgccaagctcagctgcgcgcaatgcggtggaatagccgccggggccggcaccgatgattgccaaatcgaattgttcgttcatattgacctcctcggcagtatgtttcgcaaaccagcatggctcccatcataggaagccatactggtttgcgctgtcagcattgcataaaaaaatggcttcctcgcaaggaagccagaagatgagtatcagtccgcaggccagtgaccgcgtttcgggtaacgcggcttggggagcctccagcggcgcatctgaatggcacggctccacgcgtaggagaaggagcgagatcccttcgacacagacgactcgccatacttggcaatgagcttggccttaagcttgcgccacatcagccacacgtcgatgattacggcaatcaggtagccatacatgcacagcatcatgatgatggatacccactggttctgcacgagagacgtgacaagcatggacgcaatcaggatcgcaaatgccacgggaataaaccattcgccaaggttaaaacgggcgtccacgtaatcacggatgtaaatgcgccaaggcaaccgttcggccttgggcatgtgattgatgtcgcccttctgcattgcctcgtattcggcgttttccttctcgcgtagacgagccttggcggcttttgcgctggctttgcggtccaccggaaccagcggacggatgccggcggcctgagcctgcttcatctttggagtgggacggcctttcttctcgttgggtgcggccttcttcgcggcttcctcaacgggaacctgagcctcttcttgtttcttgaacggattccatgtcatgctttgaggttacggtgacgttcagacacccgaccataaggcgtagccattgcaataacgccacttacaacatatatagaggagaactaccatggccgcattgactgccaacgagattcgttctcgtgtggaatccgactggaatcgcatcgtcaaggtgttgagcgagaaagtggcgctgcagtcgatttccgccaacggcattaccgccgagcacatgaggcgttccgcgcaattcgtggccgatgaactacgactggtcggtgtggatgccaaggtggtgcaagcctccaatgcggacggtactccaggcgcgtgggaagtcatcggctcacacatcgtgaacccggatgcgcccaccgtgctgctgtacgcacaccatgacgtgcagcccgtgccggatccggccgaatggaacaccgacccgttcgtggccactgagatcgatggccgcctctatggccgtggttccgccgatgatggcggcggcattgccatccattccggcgcgctgaaggccctcggcaatgacctcaaggtcaatatcaaggtgttcatcgaaggcgaagaggagatgggctcgccgagcttcatcccgttcatcgaagcccacaaggacgagtttgccgccgacgtcatcatcgtggccgattccggcaactggtcggccgatattccctccctgaccacctctcttcgcggcaatacctgcgtggatgtgaccgtcaagggtcttgaacacccagtgcactccggccaatatggtggcccgatcttcgattccaatacgctggccgccctgcttatcgcctccatgtatgacgagaacggcgatctggctgtgcccggcgtggctgccgaagagccgatcggcggcctgcagcgcgacctcgacgagaccaccgtacgcgaggattccggtgtggtttccagctacgagttcgccggcaccggttccctggcttcccgcctgtggaccaagccgtccgtgaccgtgatcggcttcgacgcgcacccggtcgaaggctccttcaatgtgatttccccggagactcgtttccgtctgtctctgcgtaccgcgcccacccagcgccctgaagaagcacaggaagccttggccgcgttccttgaatcccacgcgccgttcggtgccaaggtcactgtcgagcgtggcgaaaacggcatgggttgggccatggacccgaccgccatcgccaccaaggatgcgctggaagccatgaccgaggcgttcggtgtggaacccattaacaagggtgagggcggctccatcccgttcattcccgaactgcagcgcatcttcccgtctgctcaggtgttggtcactggccccgaagacccgaaggccaacgcacacagccccaacgagtccatctccttgccgggcttgaagaacaacgtgattaccgaggccctgctgctcgataagctcggtaagtagtttcgcgttctatagagccctggttcagccaccaatagcggcgccgacttgtcagtatttggcgattcggcgccgtttggcatatcttagcgtcgctattctgccagttcttggcaacaatgcgccgctgaatgccgcttagcgtcgccattgtgccagttcttggcagcttggctccgctgacaggtcttctgtggcgccaacttgccaaatagcggcatcgtgtcttcactgagagcctcgccacattgcttaccgaatctattgcctttgacggtggtttgctttatagtcggggagttgacacgggagctgccgacaggcggctgagaggagacgcatagtctcgaccgatggaacgtgaccggataatgctggcgcacggaattgtcgctcttatttacccgtgcctgaaccaatcgtgcaagctgctgtggtttgcgtgagaagagaagaaaggcacatcatggctgaagctgtagccaaggctaattacaagtggcgcgttgtcgatatcgtcgtcgccgctattctcgccgttgcatccggcgtcatcttctggggctgggatatcgtttgcaccgccccgctgactctgtttgagggcgtgacccccggttttgaaggtctgctcaatggattctggctgttcgccggcccgcttgccgccatcatcgtgcgtaagcccggcgccgccctgttcgccgaaactctcgccgctttccttgagctcacgctgggcaaccagtggggcgtcggcggctcgctgatcgtcggcatcatccagggtctgggcgccgagatcggcttcgccgttttcgcttggaagaagtggaacctcggcaccaccatcctttccggtgctcttgccggcgttggctgctgggcctactactgggccaccaacccgggctggaacgccatgcgtgtcacctggtacctggtgggttccatcatctccggcatcgtgattgccggcgtggtggtctggtacctgtcccgtgcgctcgccgccaccggtgcgcttgagcgttttgaatccggacgtagcaaggcacgcgtctgatgcaggtcgatccggctgcggtagaggctagcggctggggctggcggcacgccacgcgcaaggatttcgcgttgcgtgccgtcgatttcaccatccggccaggtgaacgtgtgctcttgctcggtgcttcaggtgcgggcaaaagcacaatgatggccggtctcgcgggtgtgttgggcggcgatgaggaaggcgagcaggaaggctcgctcaccatcgacggtgttgacgcgcgcgaggcgcgaggccgcgtgggactggtgcttcaggacccggactcgcagatcattcttgaacgactgggcgatgacgcggcgttcggctgcgaaaacctcaacgtgccacgtgaggaaatctggcagcgtgtgcgcgaatcgctggatatggtcggtctcggagggctcgaactgggccgctccacccgtcatttgtccggcggacaacggcagcggctcgctctggccggcgtactggccatgaagcctggcctgttgttgctggacgaaccgaccgccaacctcgatcccgaaggcgtggtcgaagtgcatgatgcggtcaaaaaggtcatcgagaccaccggccagaccatggtggtggtcgaacaccatatcgacgtatggcttgatttggtggaccgcgtgatcgtgctcggtcggcccgatgccgattctccggctggagcgattatcgcggacggcaagcccgatgaggtatttgcgcagatgggcgacgttctggccgccggcggcgcgtgggtgccgggacgtgcgattcccgattatcgtcccgacgatgaaacccgtggggaaacggtgctcagtaccgagaacctcagctttggacgcggcacggcgctgggtaccggcatcaatctggatttccacgccggcgaagtcacggcactgatggggccgaatggtgcgggcaaatcaaccatggcactgaccttggcgggtctgctgaagccgattgatggcaaagtgctgattgcggatagtttgaaaccgccgcacgcaggtcaagaacccatcaactggaaaagcaaggaactgctggggcgtatcggcatggtgtttcaggagcccgaacatcaattcgcgtctaacttcgtgcgcgatgaggtggccatcggacccaaatcgatgggacacagtgaagacgaggcttaccagaccgcggatcgtatgctcgagcagatgaacctcacccgcttcgccaaagcgaacccctacaccttgtccggcggagaaaagaggcgtttgtctgtggcatccatgttggccgccgcacccaaagtgctggtgatggatgagccgacattcgggcaggacttcagcacctggaccgaaatggtgaagttgattgccgcgattcgcgatcagggatcatgcgtgatcatggtgacgcacgatgaggcgctggttgacgcgctgggcgcgcgacgggtgatgttcgaggagacgcgggcatgagcgacgtgattcgattcgttactgatgatgccggtgccggagcatctggggatacggtgtccgggaacgccgcggcaaagccggcaagtgcggcggccgctgtcgcggtaagcgatgtggtgacggtcagtgcgcaggagacgcgcgtggaaccggtcagagtctcttcgccttcctggtttgtggcgcgtatcaacgcggtcagtcgcattatcggcgcgttgctactgtgcattccgatgttcatcagtctggacgtggtgtccgcatcggtggcgctgggcatcgaattcgtgctgctgtggattggcggtgtggcgccttggaccgtatgccgcaagacctggccggtgtgggttgcggcagcgggcagcttcatctccgtgttcctctatggccgtacttcaggtgagattctgtggcaaagcggctggattgtcatcagtgaaggatccatatatctcgccatcgctactgccatcagggtagcggcgatcgccgtaccgggcgtgattctggcgttgggacttgaccccaccgatctggctgacggactggtggagattctgcatttctcgccgcgattcgtatatggaggtctggccggactgcgcatgttcaccctgctgcaggaggactggcgagcactcggtctgtcccaacgctcgcgcggcctcggtgacggtaacgccatagcgcgtgcgctttcccaggcattcggcctgctggtgctctccattcgccgtgccaccaagctcgccactgccatggaagcacgcggcttcggctccaatgccccgcgctcgcaagcgcgtatctcccgcctgaagcccattgactggctcttctacgtcatctgcctagccgtcccgttggtctccctaggcgttgccattggtaccgggaattggcacttcgcttttcagggtgtctgaaagacaacgtaatgccccggcagtagggtagtgaccatgcccatcacgcctaagattcttgataatccgaagtccgaccgtgtgcgccgtatcaccgatttggcccgcgccaaaggccgggaacgttcgggccgctttcttatcgaaggccctcagtccgtgcgagaagccgtcacatggcggcccgacgtggtgcaggatttgtatgtggaagtcgcacaagcgctggatcatccgcgcatcgtttcctccacgctggagagaatcgtcgaagcgtcacaggatgccaccatttatgttcatcagtgcactggtgatgtgattcgtcgtatcagtgcggatgcccaaggcgttctggcggtgggcaatgcgcaggtcatgcagtcggacgtcgatgacctcgccttggataccgcagattatgctccgcggattgccgcattctggcaggtgcgcgatccgggcaatgcgggtacggtaatccgcgcggctgatgccgcaggttgcgatgccgtcatattcgtggatgattgcgtggatgtgctcaatcccaaggtcatccgctccactgcaggatccttgttccacctaccggtgctcaccatgcgtacggacgaattcttcgattggacttccgaccatcatgtggacgtgtgggccgctgacgtatacggtaccgagaaacgcaagccggaaagcctgcccgcggtattggcggacaaggcagcggtaagcatgtctcaggctgtgctgttcggcaatgaggcgcgtggattggaaccggagatccttgaacgatgtggccgcatcgtctccattccgctctatggaaaggccgaatcgctgaacctcggtacttcggccgcggtgatgctgatgtcgctggctatgtcgggtcatattgaaagaatgtgaaatcggtaaaaacgctagaaatgctgagaaatcatcagatgaaagggttctcgtggcagaacaaatggtgttcgacgccgaccaggtgaccgcagcggtcgccgagggcatcgagaagatccagcacgcctccaacctggaggaactcaaggccatcaaaacacagtacgcaggcgccgattcggcgatgacccaggccagcaaggccatcggttccctgccggccgatcagaagaaggaagccggcaagctgatgggcaagctacgcgccgatttcggacgcgcctttggccccaaggagaaggaactcaaagaagctgccgaacaggccgcccttgccgccgaaaccgtggacatgacgttgcctgtgaaccgcaagcctttgggcgcccgtcatccgctggccaagttgatggaggacgtcgaggacttcttcatctccatgggctggcagatttcctccggcccggaaatcgaagcggaatggtacaacttcgattccctgaacttcggcccggatcacccggcccgccagatgcaggacacgttctacgtcaagggcaaccaggccaaggacgctgccggcttcgtcggctccaacatggtggtgcgtacccagacttcctccgatcaggttcgcgccctgctgacccgcggcgtgcctctgtacatcgccagcccgggccgcgtgttccgtaccgatgagctggacgccacccacactccggtgttccaccagtgcgaggccctcgccgtcgacaagcacctgaccatggctgacctgaaaggcgtgctggacaagctcgccgtcgccatgttcggtcccgaggccaagacccgactgcgtccgagctacttcccgttcaccgagccgagcgccgagctcgacctgtggttccccgataagaagggcggccccggctggctcgaatggggtggctgcggcatggtgaatccgaacgtgctgaagtccgcgggcatcgacccggaggtctacaccggcttcgcgttcggcgtgggtatggagcgtacgcttctgctgcgcagcgacatcaacgatatgcatgatttggttgaaggcgacgtgcgtttcgccgaacagtttgtgatgggggagtgaattacccatgcctatgatcgacatcgattggctcaaggaccacgtcgaggtccccgaaggcctgacctatgaacagcttgccaaggacctcgtcaaggtgggccttgaagaagaggagattcactcctcccaggtgaccggcccgatcgtggtcggctacgtggtggacgccactcccgaaccgcagaagaacggcaaggtcatcaactggtgccacgtggactgtggcgacgaatggaacgagaccgacgagaacggcaacaaggtgccgcgtggcatcatctgcggcgcacccaatatgaaggccggcgagaaggtcgtcgtcaccctgcctggcgccgtgctgcccggcgacttcaagattgagccgcgcaagacctacggccatatctccaacggcatgtgcgcatccgagcgtgaactgggtcttggcgacaaccacaacggcatcatcctgctacgtgagtatggcttctccgaggccgaatacgaagctctgaagcccggccaggacgccatgcacctgctacatctcgaccagccgctgctcgagatcaacatcaccccggaccgtggatacacgctgtcttaccgtggcgttgcccgcgagtaccatcactccaccggtgccgcctacaccgatccggccatcgcgctgaacgagaaggctccggagcctgctgattaccagcccggcactccggtggacatcgacattgagattgatgacaacaacccgattcacggcgttcccggttgcgatcgttactacgctcgcgtcgtcaagggcttcgaccccaacgcccacacgcccagctggatgcgtcgccgcctgattcgtgctggcatgcgctccatctcgctggccgtggacgtgaccaactacgtgatgctcgatctcggtcagccgatgcacgcctacgacctcgataagctcgagggcccaatcgttgtgcgtcgtgccaacgagggtgagaagctcaccacgctggacggcaaggaacatgacctgagcactgaagatttgctcatcactgattcgccgaatggcgaacgcggctcgcgtatcctcggccttgccggtgtgatgggtggactgtacggcgaggtgaccgccgacactaagaacatcctgctggaggccgcgcacttcgatcaggtgaccatcgcccgttccgctcgtcgccacaagattccgtctgaagcatcccgtcgtttcgagcgtggcgtcgacaccgagctgcagcctgctgcggctcagatggccgccgagctcatggccaagtacggtaacggcgagcccagcgagcatccgaacgatgtggataacacgccgcgtccgaaggtcattcacttcaaggcttccgaagtggcccgtgtggccggtctcgatgtggacatcaaccgcatctccgacattctcaccgacatcggctgcgttgtggccggcggcggcaacggcgaattctccatcaccgcgccgagctggcgtccagatctgggtgaaccgtgtgatctggtcgaggaaatcgcccgactggtcggctacgaccagattccggtcaccgtgccgcctgcaccggtcgagggccttgtgggcctgaccccggatcagactcgccgccgtcgcgtggcggacgagctggccgaatacggcatggtcgaggcgctgagctacccgttcgtcggtgacgacgattaccgcgctttcggcttcgaccctgaagccaccaagaaggtcagcgtcgagatcgccaacccgctctacggcgatcgcccgtacctgcgtcgtgacattctgccgaccttggccaccaccgtgcagcgcaatattcgccgaggcatcgaaaacgtgtccctgtatgaactcggccatgtctatctgtgggatccgaacgcgcccgcaattccgtctctgcccggtggcgtgcgcccgaccgatgagcagctggcagcgctggacgccggtctgccggatcagcccgaccacgtggccggcatcctgaccggtctggctgaggacgatggctggctgggcggcaagcgtccggtcgattggtcggacgccgttgaagccgtgcatcgtcttgcggatcgcatcggtgcgaagatcgtgcttgatcagcctgcggccgaagatgtgcctgcacagtggcatccgggccgtgctgcccgcgtcatggtgggcgacgtgttcaccggttgggtcggcgaactgcatccgcgcgtcaacgaggcacttggcttcccggcgcattccgcggcgtttgagctgaacctcaccgcgctgttcggcaccctgaccggcaagccggtgcaggccaagccgatttccaccttcccgccagtcaagcaggatttggcctttaccgtggatgcgtcggtgagcgccgatcagctggaagcagtgattcgtgaggcggctggtgccaacctcgagtccatcgaattgttcgacgtgtttaccggcgagcaggtgggtgagggcaagaagtccctggcctacgctgtggtgttccgttctccggacaagaccttgtccgccgatgacagcgacgccattcgccaggctatcgtggccaaggctgccgatctcggcgcccagctgcgtgcctgatcactgtacgaaagcatgaggagcgccatgagtgaaccggaacatagcacaccagaatacgggcaataccagaagcccgcatatggtgcgatgtcgggccaatacgggccaaactacaacccgtacatttatggcgctcccgaacccgatgccaataacggctccgctgctgataacaacggagccggagccgggcagccgaacaatggacggccctcttcttccggcaattcgttcggcggcaatcagcagtatgggcagtcccagcagggcaacccgtttggaccccagtacgggtcgtgctcccggtttggcagcagccagccgaatggccagtcccagcagcctcactactacaacggtatcgatctcaatgaccccaatcagaatccgctgtacgggcattgggattcctatgcaatcatttccttcgtgctcgccatgttctttcccgtaccggtgctctccgctctgatgggcggcgtggcgatgtggcggacgcgcacgttccatatgaagggctttggcctggctcttgcagccgtgatcatcaacgtgttctacacccttgcggttatttggatggcattgaacggctatgatgccatgactctgtatcaggacatccttcagcagttcaccggtagcggcactggtccctcatctgattccatctctgcatagggctgagttgctgcaacacacccactgtataactatgcaatagtctgcataatcgcgtatactcatgcgaagtacgtcagcggaaaagagatgagtatggcgaaatatacagtggccgtagccggtgctacaggctatgccggcggcgaggcgctgcgcattcttgcggcacaccccgactttgcaatcacatgtgtggcaggccattcctccgtgggggaatcgatggccaagcatatgccgcatattccgcaactggccaatcttgttgttgaagacaccacgcctgaggtgctcaacggccacgatgtcattatccttgccttgcctcatggcgcttccggcaagctcgcatcccagctcgacccggatgccgtggtcgtggatctcggtgccgatcatcgtctcgaagaacaggtcgcatgggatgaattctatggcggcgatttctacgagcactggacttacggcatgcctgagctcatcaccggcaagactgccgatggcgcatacacccgtcaacgtgaggcgctgcctggtgccaagcgaattgcgggccctggctgcaatgtgactgccacgactctggctctgcaacccggcatagcggaagggttggtcgaaccgaaggacatcgtggctgatttggtcgtcggctactccggcgcaggcaagaacctcaaacgcaccaacctgttggccgccgaggcattgcaatccgcgctgccgtactcggtgggcggcatgcaccgtcatattcctgaaatcctgcagaatttcgcccatgcggccggtgagaccgcagctgatgccggcaagttcacgcttggcttcaccccgatactggcgcccatgtcccgaggcattctcgccaccgtgtcggctcgcatgaccgacaaggccaaggcgatgagtgacgaagcaatccgagacgtatgggcaaaagcttacgaaggccaggacttcatggtgctgctgcctgagggcacattgcccaccaccggcaacatcatcggttccaacgccgctcacctgcaggttgtcaccgaccgcaagtccgggcgcatttatgccttcgccgccatcgacaacctcaaccgtggtaccgccggacaagcggtccaatcattgaatatcgcacttggcctgccggaagatgcaggcctgaccaagatcggagtagcaccgtgagcgtcacattcgcgcaaggattctccgctgccggcgtggtggcgggcatttcatcggttgaaggcaagaaggatctcgctctcgtggtcaacaacggcccgcttgacgcggtggccggcgtgttcacgtcgaaccgattctgtgcagcccctgtgcagtggagccgcaaagccgtggcggacggtcacgccaaagccgtgattctcaactccggcggtgccaacgcctgcaccggtgaggcgggatatcaacagtccgtgtccaccgccgaggcggtcgccgaactcgtcggcgcacaagcagaggatgttgctgtgtgctccactggtctgatcggcgagctgttgcccttggataacgttttggccggtgccaaagccgcttatgctgctcttgccagcaccgccgaggccggggcggacgcctcacatgccattatgaccaccgacaccaaggccaagaccgtcgaactgaccggttccaacggctggaagatcggcggcatggtcaaggggtcgggcatgatcgccccgcagctggccaccatgttgtgcgtcatcactaccgatgccgtggtcagtgccggtcaaatgcaggccgcgcttaccgtggccgccgagcattcgttcaaccgtatcgacgtggatggttgcatgtccaccaatgacacagtgctgctgctcgcctccggagcctccggcgtggagcccgacaaggacgagttcaacaagctcgtgcgcgaggcctgcgcctccctgtcccgtcagattatcggcgacggtgaaggcgcttcccatgacattcgcatcaccgttaccggtgccaccagcgaagacgcggcccttgcctgcggccgtgcggtcgcggcctcgaatctgctgaaatgcgcgatctccggcaatgacccgaactggggccgtatcgtcagctccctaggcaccgtttcccctgaagttgcaccttatgattccgagaaggtgaccgtcgacgtcaacggcgtgcgcatctgcgagaacggtggtgccggacgggaccgtagcgaagtcgacatgaccccgcgcgaagtccacattgacatcgacctcaacaccggatcgaacgccgaggccaccgtctggaccgacgatctgacccacgaatacgtccacatcaacgccgactacgaaagctgacatccaccatgctctcgctggcggatgtcgccgtgaagcaaatgccgagaggtgtttgtaggcgacgtgttcgccgacaggagaaccgacaaaacgtaggcaacgcctactgtaattgcaagacgctgtccggtggaaccggactgagggtggtctcgccaaaccacccccagtcatgcgcagcatgacagcccccgtcagcggaggcaaagttacggaaagaagaacatggctactgaattgaagggacctgggttccatttcgacgtgcataccgatttgcgcgccgatcagaaggcggaagtgctgattgaggcgctgccgtggctggaggaattcgccggccagcgcatcgtggtcaagtatggcggcaatgccatgatcgacgatcacttgaagcagtgcttcgccgaggatatggtgttcctgcgccaggtcggtttgcatccgattgtcgtgcatggcggtggcccgcagatctcgcacatgctcaaggccctcggcatcaagtcggaattcaagggaggcctacgcgtcaccacgccggaagcgatggacgtggtgcgtatggtgctgaccggcaaggtctcgcgcgaactggtcggcatgatcaacgcgcacggcccgatggcggtcggtctgtccggcgaggatggaggtctgttctccgccatgcagcgcaagcccgttatcgacggcaagcccacggatgtcggtctggtcggcgatgtggtgtccgtcgatgcctccgcggtcgaggatttggtcgcggccggtcgtattccggttgtttcctctgtggctccgaatgaggaggacgccaccgaggtactgaatgtgaacgccgattccgcggccgcggcccttgccgcagccgtgggcgcgcacaagctggtcattctgaccgacgtggacggtctctatgccgactggccggataagaattcacttatcgggcgtatcggcgtggaggatctgcgcgacatgctgcccgatctggaatccggcatgcgccccaagatggaagcatgcgtgcgcgccatcgatggtggcgtgccccaagcccacatcatcgacggtcgtaaaccacactcgatcctgaacgagatattcacctccgccggtatcggcaccatggtcgtgcccgaaggcggtatggaaatgaggagttcctatgagcactgagcagaacgagacgctgggcgctgaagacagcaagtggctgggggagtactcccaggtacacatgaacgtgttcggcacgccgctgcgtgtcatggatcacggtcatggcgcgcatatttgggacgttgatggcaacgaataccttgacttcctggctggcatcgccgtcaattcgctgggctatgcccatcccaagtgggtgaaagccgtgtctgagcaggcggccaaggtggctcacatcagcaattatttcgcttccgagccgcagatcgagctcgccgcgaagctggtcaaactggccggtgccccggaaggctccaaggtctacttcggcaattccggtgccgagggtaatgaagcggcattgaagctggccaagctgtatggtcgcaccctgcccggcgcactgccgtccatcggcggtaagcccgcccgtattcttgccatgacgcacggcttccatggccgtacgatgggtgcgctctccgcaacttggaagccgaacatccgcaagccctacgacccgttggtgcccaacatcgaattcgtgcgcgccggcgacaaggtcgccctgtacgaggcgttctcccagaccggtcttggccactatggcaaggggccggtagcggcggtgattctggaactcattcagggtgaggccggcgtgcagccgttgggtgccgattacgtcaagttcgtgcgtgagctgtgtgacatcaaccatgcgctgctcatcatcgatgaggtgcagaccggcatcggccgtaccggcaagtggtttgcatttcagcgtgaggatctttccggcggcgtgaccccggatatggtgacctttgccaagggagtggccggcggattcccgatgggtggcatgattgccttcggcgagaagcttgcagccctgttcactccgggctctcacggatcaacctttgccggcaacccgttgggcgcggcggctggacttgccacactcggtgccattgaggacgataacctcattgccaatgccgaggtccgcggccagcagctgcgcgatggcattatggccaccggcaatccgctctacgtatccgtgcgcggtcgtggtctgctcgatgccgtagagctcaagcatccctgctcccacgccgtcatgaactactgcctcgaacacgggctcatcgtcaatgcggtggcccccaatgcgctgcgtttcgcaccgccgctgattgtaaccgccgaagacgttgaccaggcgctcgccgttctcaaggacgtgcccgctgatctgccgaacgactgacttacctgacctatataaggagatcaccatgaccccagaactgcgccatatgctgcgtgatgacgacctcaaccatgaggagcagaagcaggtgcttgagcttgccatcaagttcagcaagaaccgtttctacaagcagccgtttgccggtccgcaggccgtcgccgtgctgttcgacaagccttccacccgtacccgctccagtttctccattggtgttgccgagcttggcggctacccgctggtcattgacaagtccggctcccagctgggccgtggcgagcctgtggccgataccgcccgtgtgctcgaccgtatggcctatggcgtggtctggcgcacctttggtcaggatcgcgtggaggaaatggccaagtattccacccacccggtggtcaacgcgctgaccgatgacttccacccctgccagattcttgccgacttccagaccatcgccgaacaccgcggcggcgtggacaatctgaagaaccagaccatcgcctacctcggtgatgccgccaacaacatgtccaactcgtatctgctcggcggtgccgttgccggtatgaacgtgcgtgtggccggacctcagggctacctgccgcgtccggatatcgtggccgatgccgaacgcattgccgctgagaacggcggttccattctggtgaccactgatgcccgtgaggccgtcgccggtgccgattgcgtgtttactgacacctgggtttcgatgggtgaggaagctgaatacgccatccgatccaagccgttctgggattatcaggtcaatgccgagctcatggctctggccaagccggatgcgctattccagcactgcctgcccgcctatcgcggtaaggaagtcactgccgaggtgattgatggcccgcaatccgtggtgtgggatgaggcggagaaccgtctgcacgcgcagaaggcgttgctcacctggctgaccggcaaggcccgtggagacgaaagcctgctcgcatgagtgaggtcctgccgtccctgcagcgccctgccaccagggccgcgcgactcagtgccattgaacaggcgctgaccacgcatgtcatcacgtcacaatcgcagctgtcgaaaatcctattggacgaaggcatcgcggttacgcaggccacgttgagccgcgacctggatgagatgcatgcggtgaaaacccggctgaaggacggtacggtggcctatacggttggacgtggttcggcggttgccgatgtcgaggacgtgggggagcgcaccgaggctcagatggctcgtgtgctcaatggtctggtcacttcggtggccgctgcccgcaaccttgttgtggtgcataccccgtccggagccgcacaatatgtggcttccgtgattgaccgtcagcccatcgacggcgtgcttggcaccatcgctggagacgataccgtcatggtgatctgcgctgacgacggcactgccgtctcccgctctgactggctactcggcctcgcctccaaatagtgttttttcttgccccccccccaaggtgaggggagctgtcactgtaggcgactgaggagagttgcccaatcctccccaacacgccgtgcataaatatacagtcctctgtatatacttgcatcagtttgttttttcagaccttgaatgaaagggaaccaatggcagataacaagcgcattgttctggcctactccggcggtcttgacacctccgtcgccatctcgtacctgaaggagcgcaccggcaaggacgtcgtggccgtgtccctcgatgtcggccaaggtggtgaaagccttgagaccatcaagcagcgcgccctcgcctgcggagccgttgaatcctacgtggtcgacgcccgtgacgagttcgccaacgaatattgcatgaaggccctcaaggccaacgccatgtacgaaggcgtctacccgctggtctccgccatctcccgtccgctgatctccaagcacctcgtgcgcgccgcccaccagttcggcgccgacaccatctcccacggttgcaccggcaagggcaacgaccaggttcgtttcgaggtctccatcgcctccatcgacccgacgctcaaggccatcagcccgattcgtgatctctccctgacccgtgacgtcgagattgcgttcgccaaggagcacaagttgccgatcacccagaccgagaagtccccgtactccatcgatcagaacgtgtggggccgcgccatcgagaccggcttcctcgaggatccgtggaacggtccgaccaaggactgctactcctacaccgacgacccggccttcccgccggtcgaagatgaggttgtcatcgagttcaaggaaggtatcccggtcaagatcgacggccgcgacgtcaccccgctgcaggccatcgaagagatgaaccgccgcgccggagcccagggcatcggccgtatcgacctcatcgaggaccgcctggtcggcatcaagtcccgcgagctgtacgaggctccgggcgccgtggccctgatcaccgctcaccaggaactcgaaaactgctgcctcgaacgcgaacagcaccgcatcaagcgcgacatcgacaagcgctggggcgagctggtttacgatgcgcagtggttctccccggcaacccagtcgctcaacgccttcatcgaagacacccagaagtacgtgtccggcgagattcgcatggtcctgcatggcggtcgcgctgtggtgaccggccgtcgttccgactcctcgctgtacgactacaagctcgccacctacgattccggcgataccttcgatcagaagtcctccaacggcttcatcgacatctacggcctgccgtcccgcgtggctgccgcccgcgatgtcaagttcggcaacggcatcgaggtcccgaagaacaccgtcgagtgattcttactcagtcgcccccgctgcgaggctgtcggcatagctgactgggagtggtctttgaaaggactgtcctcagtcacactccatgtgacagccctcgccagcgggggcaactgtatgtttgaacacattgctacgcttaaacacagctattttcacttttcaaggagctttcatgactgagaacaacgaacatttggccttgtggggtggtcgttttacatccggtccgtctccggagttggcccgactgtccaagtccacgcagttcgattggcgtttggctgacgacgacatcgctggttcccgcgcccatgcccgtgctctttgccgtgcgggactcctgaccgccgacgaactgcagcgcatggaagacgcactcgatacgctccagcgtcacgtcgatgacggttccttcgctcctatcgaagacgatgaggacgaggccactgcgcttgaacgcggactcatcgacatcgctggcgacgaactcggcggcaagctgcgtgccggccgctctcgcaacgaccagatcgcctgcctgattcgcatgtggctgcgccgtcactcccgcgtaatcgccggattgctgcttgacctggtcaacgcactgatcgagcagagcgaaaaggccggccgcaccgtgatgccgggtcgcacccatatgcagcatgcccagccggtgctgctcgcgcaccagctcatggcccacgcatggccgctgatccgcgatgtgcagcgactcatcgattgggacaagcgtatcaacgcttctccgtacggctccggcgctctagccggcaacactctcggccttgatccggaagcagtggctcgcgagctcggcttctcccgcgtgaccgacaactccatcgacggcaccgcagcccgtgacctggtcgccgaattcgcattcgtggccgccatgaccggcgtggacatctcccgcttgtctgaggaaatcattatctggaacacccaggagttcgctttcgttaagctcgatgacggctactccaccggttcctccatcatgccgcagaagaagaacccggatatcgccgagctcgcacgcggcaagtccggccgtctcatcggcgacctgaccggtctgctggccactctgaagggtctgcccaccgcctacgcacgcgacctgcaggaagacaaggaagcggtgttcgatcaggtcgacacgctcgaagtgctgctacccgcgttcaccggcatggtcagaaccatgcgcttcgatgccgaccgtttggaagctgaagccccgaccggcttcgctctggctaccgatatcgccgaatggctcgtcaagaacggtgtgccgttccgccatgctcacgagctctccggcgcctgcgtcaagcttgccgaaggccgtggccaggaactctgggatctgaccgacgaggacttcattgagaccttcgccgcattcctgccggccggaaaggctccgggcgtgcgtgaagtgctctccagtcacggttcggtcgactcccgcaacggcaagggcggcaccgcctatggtcgtgtgcgcgaacagattgccgatgccaaggccagtgtcgaagagctcaagctgttcccggcctccacttctgacggttccgcgtataaggcccccggcacgttttaaactgtgcgctcccgttggcgggggctgtcggcgaagccgactgggggggggcgaaggtctttgtccacatgacccccctcagtctcgctccgcgagccagctcccgccagcgggagctaggttttgcgttgtcatcgcaacggcctacactgaataaccgtaacgaacgggagccgtaaggctgagaggaagtcgccagacttcgaccggggaacttgacgcgggtcatgccgccgtaaggaatcgttgttcttggtttgttaggtttcctgcaacagtctttcattccgtttgcataatttagccgtatgacgggtcgtggtgtagccaatgcatcgcggcggccacacggtcgcatgattgggttcatgaatgggcgcaccacttaaggtacggttcgtttcgtgcacccttttttactattcggaaaggttgttatgcaggtcaacggagagcaggtcaagctcgatacgccggtcagcgttgccgactatctcgaagcacacggattccgcgccgaacgcgtggccatcgaacttaacggtgagattattccgcgcgacaagcgtgccgatgccatgcttgacgaccagtgcgttatggaaattgtacagtttgttcagggtggctgaaaggaagagctatgagcaatatcaatccggttactgaagcatccattgaggcgacgccgttgccgccgcagcccgccgtcaccaatccggtcggtaccgctgcgccgattctgccggtggaagacaagccgctgaatctgggaggccacgaattccagtcgcgattcatcttgggctccggccgctatgacctgaacctcatcaaggccacggtcgagcacgccggtacgcagatcgtcaccatggcattgcgtcgcgcgcagaccaccgaaaacagcgtgcttgattacattcctgagggcattacgctgctgccgaatacttctggcgcgcgcaatgccgaggaggccgtgcgtattgcacgactggcccgcgaagtatgccacactgatttcgtcaaggtcgaaatcgagcatgaaaccaagtaccttctgccggacaacgccgaaaccattcgtgccactgaaatgctggccaaggaaggcttcgtggtcatgccctatatgttcccggacccgatcgcagcccgtcagcttgaagaagccggtgctgccgcagttatgccgctcggctcgctgattggctccaacatgggcttgcgcatgcgtgatttcatcgagatcatcatcgccaatgcgcatgtgccggttattatcgacgccggcatcggccgcccgagtcaggcctgtgacgcaatggaaatgggcgcggacgcggtcatggcatacacggccgttgcctccgccggcaatatcccgctgatggccgaagcgttcaagcatgccatcgatgccggtcgcgcggcctacctgtctggtctcggcaaagtgaccgaaggccaggctgtgccgtccagcccgaccacagggtatttgcactgatggggagtggctcccctctctgcgggggagccagaaatatggagacaatatggcattaacggatgaacaggtggagaggtacgctcggcatctgattttgaagggtgttggagtcaaagggcagaaacgtctgctggcctccagcgtactgatcatcggtgccggagggctcggttctccgatcgccctgtatctggcggcagccggagtaggccatatcgggctggtagacggcgatacggtggatctgagcaatctgcaacgtcaaatcattcacactacagcgcgcgtgaacgaacccaaagtggagtcggccgccaccgccatccgtgaactcaacccggacgtgacggtagacacttatcaggcgattgtagatgccaacaatatcaccgaccttatcgaaccgtatgatttggtgattgatgccaccgacaatttcgccgcaaaattcctcatcaatgacgcttgcgtgttagcgggcaaaccgtatatccatgccggcgtggtcgggttctccggccaagtgatgacagtcatccctggcgaaggcccctgctatcgctgcattttccgcgacatgccggcagccggtgagattccgacctgcaaggaagccggcgtattgggggcggtagttggtgtgatcggcagcttggaagccactgaggccgtgaagctgatagtcagcgtgggggagccgctggtgggccgaatcctcaccgtggatgcgctgaccatgaatatccggcgagtgccgctgccgagccatgtgtctgattgcccggtgtgtggcgaacatccgaccattaccgccattaatgcagccaactatattcagccggcctgcgcgatttagacctttgtggcttccctcagcgaggagagccaagtattacgctgcatgaagggagaagaacatgcctattgctttgcgtaatgcggttgatgatgacgagagcagcgaaaccgcataccgccatatcgcacccgaagaacttgccgggctcgacccgaacacggtcacgttgctcgacctgcgcgagccggccgacttcgccgcgcatccggtgcccggtgccatcaatgcgccgttcgacccgttggcccatgtgctcaagaccgtgcccaaggaccggacagtcgtcgtctattgtgcggaaggatggtggagcgaggaagtcgcagaaatccttgccgatcgaggctatgacgtggccagtctgacaggcggctttcgcgcgtatcaggaatactggcagacgcatcttcaacagacggaagcgcatccacagatgcctcggtaactcgcagatatcgtggtatcttcacaccgttggccgtcgcatcagccaatcatccctatggatgaaccccctcgaacataagcttgccctacaatcggtcgtggttctgcatgccattcgttcaaccatcctcatgcaatggcagagcggacacgaatcagcccaaacaagggaaggatcgaaatcgtgggacatctgctcacccgcacgcagattcgacgcctggtcgccaggcatggccgtgaggtcatcgaacatcggcgcatgcagatcgaacgttgctgttatcagcacggcaacgtcaccacgttcgcgcattccgtacgcgtcgcctgtctggccgtgtggatggccgatcgtgcgcatttgtggcatcgcgttgacctcaaatccctgattcgcgcggctttgctccacgactatttcctgtacgattggcatgactgggataacggcgaacaccgatggcatggattcacccacggtcatgccgcattggtcaacgcgcttatggatttcgatctcaacgatatcgaacgcaacagcattgagaaccacatgttcccgatgacgccgattccgccgcgctatctcgaaggctatctggtcaccttggcagacaaatgctcggccaccgtcgagaccttctcgttcgaccggtttaacaaacgtgcattacctgatgcaaagccctatgccgaaatagaagctcgccgatgattatcgcacttgaacactacttcctgtggttcctgttctacagcttcgtcggctgggtctatgaatccattctcgtctcctgccagcagcatcgtctggtcaatcgcggattcctgaacggtccgctgtgcccgatttatggcaccggcgcgacactcgccatcgccgttctcgggaatgtgcataatccggtgatcatctttctggtttcgatggtgggtgccacaatactcgaatactcgacctcatgggttatggaacaactgttccacgcccgctggtgggattattcgaattttcgcttcaacctccaaggccgcgtctgtctgctaggtgcgttggttttcggtctcggcggcgttggcgtggtacttggttcgcagccgtatgtcgagtgggccacggatatgattccgctgccgatgctgcatacgctggtcacggtgctggccgcactcgtcatcgtcgatttggcggttacggtggccggtatgctcggattcgagcaggtgctcgactcggtggctcaggcggtgcaggatgtggctgcgcgcgcaggcggaacctggcaatgtggtgccgacgcagtgtctgacaagatgcgcgagctgtcgcaggatacgcttgagcgtctgcgttgggtgatcagcggtgtcgtcaatgcccagcagaagcgtatgctgaagtcctttccgaagttccagatgcccggtcgtcaggacatcatcgactcgctgcgtgaactgatgggcccacgcaagtaacacaatcggggctcgtcagattgtgtgcatcaagttatccgggccgtccaccgaaatcgaacgttgggattctacactggaaccgggctccttgtaatcagtgatgccggcaccggtgttgggcacgattgacgagtagatgttgtcacccacatacgccaccagcagcacgatggccacgatgaacataatgcggcgattcgcgcgggcgagcagattatccaaaaccggggcgagtaagtatgcgatggccaatcctcccagcccaaaggtcagcagaccttcggcgcagatgcggccgttgaggttcaggaagtagccggtgtaatcccaccagcgctggccgtcatgggtgatctccagataccatgacgagaaatattccaagcaaccgcacagaatcaccgtaccgacgaacagtaaagcgggacgatggcgcagcttcttcagcagagtcaggattatacccgttggaatagaaaatcgcagacagtccgaacgtggcgatggaaagcagataccatcccaggaaactcagttgcgccacaaaacactcccacttgtggcctttcatcatacgtcgcgagagactgatcgcttcgttcgcgctgatgttcggattctcagccacgatgtacggaaccaggaagtatgaataggtttttgacgatgcctcccaccaccgtgcaccaccacagcagccgatatacgttctccaccagtaacacccatgccatgcgcacccagcatccagtctgcaacgggtagaggaagcgacgcaacggcaccttgtcgtaggtgcgggactccagcacgatgcgtcgcagtaccacacggaatacttccgtcacgaacaggcctgcggttagtgtgacaagcaacgccacaatcaccagtatcgcgatggctatgctttccgagcgaatgatggaggcagtcgcatcggtgacggatagaaggaacgaaccggtggaaagggaattgactactgcggacagcacgccgcgtgtccgcccgagcgttgcgacggtatcctggttggcgacggtccgttcattgtcccggactcggtcgcgtgctccgtttgcgtcccccgaggccatctgcagtaacaggccgaaggaatcggatgcgccggtatttgattccccggtccggctggcttcctgcgaggcggcgttcggattcatgttggtgttgagcgcggcgggcgacgacccgtaatccgcactcagaaacgccgcgaacaaacagactatgaccaacagctaataatgtcgtttcagggttttccgggcttcggcctttaacgtctttcgctgcatctgtgcttccttaactggtggagctttctcccactgtaacggagaggacggcagcatcgccacaattgacgggtttcgcactgtcgccatgttctgcgaaacttgactgtgcccaattgggcggttttatacacaattcgatagggagaagcgacaggctatggctcacgtcaccgacttcaaggaagcgggtttcaacaccctgcttgaggaactggaatggcgcgggttgatttcccagtccacggacagggatcgacttgcggaagcactgaacggcgagcccatcacctattattgcggcttcgatcccactgctgcatccctgcatatcggcaatctggtgcagctcatcaacatgcgtcatctgcagttggcaggccatcatccaatcgccctggtcggtggcgccaccggtctgatcggcgatccgcgccagtcaggtgaacgcacgctcaatccgaaggacgtggtggccggctgggccgaccgcctcaagaaccagatcggcggcattttggagactgaaggcgccaacccggtgcgtttcgtgtccaactacgattggaccgcttcgatgaccgtcatcgacttcctgcgcgatgtcggcaagaacttccgcttgggcaccatgctggccaaagacaccgtggctcgccgcctgaactccgaggaaggcatctccttcaccgagttcagctatcaggtgctgcagggcaacgacttcctccacctgtttgacgaataccactgcacgttggaactcggcggctccgaccagtggggcaacctcacctccggcctggacctgattcacaaggtgcgcggtgtggacgtcaatgtgttcaccagcccgatcatcactgatgcttccggcaagaagttcggcaagtccgagggcaacgccgtctggctcgatgccacgatgctcagcccgtacaagttctaccagttctggatcaaccgcccggatgtggagatggaaagcctgctgaaggcgttcaccttcctgcccaaggccgaaatcgaacgactggtcgaggaatccaagaccaaccccggcaagcgcgaggcccagaagaccctcgcctgggaggtcaccagcttcgtgcatggcgaggccgctacccaggccgccattgacgcttccggtgcgctgttcggacgcggtggcaacctcgaagacatcgatgaggaaacgctggaatccgtgctcgacggtttcaaggtggtcgacgagaacggcgagcacgtcttccccgtctccaagcccggtgatcgcgtaatcgacgccgcccaggctgccggactgttcaagtccgcttccgaggcacgccgcgccatcaagtccggtggcgtgtatctcaacaacaaccgtatcgaggatgaggagcaggtgctggccgaagctgacttcctggccggccgcttcgcgctcatccgtcgtggcaagaaggcgctcggcgccgtggaaaaccgttaatcaacaacgaattaaggaaaacaagtaatggcagaaggtaacgagcgttccggcaagtcctacggcggcggccataaggggtatggcgatcgccgaccgggcaaccgcggtggcaagggtttcaagccgcgcggcaagggcggtttcaagccgcgtcatgatggtgagggtttcaagccgcgtcgccgcgaggatggcgagggttacgcgccgcgccgcgatggtgatggtgaaggccacggcggctaccgcaagtcgtacggcaagggcggcgacttccacaagggtggtcgttccggctaccgcggcaatggtccgcgtcgtgacggcgaaggcttccgcccgcgtcgcgaccatgatggtgagggtttcaagccgcgtcgccgcgaggatggcgagggttatgcgccgcgtcgcgatggtgatggtgaaggtcgcggcggctaccgcaagtcgtacggcaagtccggaggcttccacaagggcggctaccgcggcaatggtccgcgccgcgacggcgacggtttcaagccgcgccgcgagggtggctaccgttcccacgaaggcgagaacggcgagaacccgcgctaccagcaccgcgacaatgatcgccgtgatttccgtcgcgatggcgatcgtcgtgacttccatagggatggagaccgtcgtgacttccatcgtgatgatcgccgcaatgatcgtcgtgacttccatagggatggcgatcgccgcaacttccgtcgcgatgaccgtcgtgacaatgaccgccgtgacggctaccgcgagttctctcaggaggagaagcgccagtaccgtgaggagaagcgctctgaatacatgaaccgtccgcgccgcaattccgacggcacgatgagcttcccctcgcagaacccgtacaccgatcgtcgccctgacgagccgaagatgcccaagggtatggaatggtcgatgctgtcctcggatgagagggagcgtctgcgcggcctgtccaaggagcacgcggagaacatcggtctgcatattctcgccgcctttgcgcaggaggaggacgatcctcagaatgctctcgagcatgccaagtgggtggctcgtcaggcttcccgaattgacttcgcccgtgaaacgttggcattcatcgcctaccgtcaaggcgactacaagctcgccttgcgcgaattccgcaccgcttaccgcatgaacggattccaggactacctgccgttcatcgccgactgcgagcgtggtcttggcaacccgaagaaggccgtggaactggcactgtccgacgagggcaaggcactgcatggctctccgaaggtcgagatgttcctggtgtacgctggcgctctcggcgatttggaaatgtgggataaggccattgatgtggttcacgccgtcggacgttcgcagggtctgccaggggagtaccgcatgcgtgcggtacaagccgaacagtatttcctcgaggaagccggccgcaacaaggaagccgagcagcttaacgatttgcttgaccgccttgaagaccagtacgccgacgaagacatcgacgaggatagcgatgacgtggtcattgaccatgatcttgaggacatcaccgacgactccgaagtgatggaaaccctcggtatcgacccgtccgaagcacagtatgctccagagcttgagcctgaagagtctgaggagcctgaggaatcagaagacgccgaggaaccggaagatgatgaagctgcggaggaatccgacgtagctgaatctgatgccactgaggagtccgaggagagcgacgaaccggccgaatccgaagagtcggctgatgatgctcccgccgaagccgaatctgaagaaaccgaggagtgagcggcgtaatgacccgttttctcaaaggcaccgatcatccgcttgccgaggcctatcagcttgcgctgctggacctcgacggtgtggtgtaccgcggcaagaacccggtcgactatgcggctgattccatccgcgctgccgaacaggccggcatgactatcgagtacaccaccaacaattcctcacgattccagcatgtggtggccgatcagctcaagggttttggcctggatgtggaaccgtggcaggtcgtcacctcctcggtggtggcggcccgtatggtagccaaagcgttgccggccggtgcgcgcgtgcaggtattgggtgccgatcatcttcgtgatgaggtcacgcgaaacggtttgaccatcgtgaatggcccggaagaccatccgcaggcggttattcagggatggtatcccgagatgacgtggcagatgatggctgaagtctcctatgcggtcgaagccggagccacatatttcgtgactaaccgcgatctgaccattccgcgtgaaatgggcatagcgcccggctgcggctcgatgattcgagccgtgatcaccgccactggtgtcgaaccagtggcctccgcaggtaagccggaagcctatatgtacgatgaagcgcgtgaactcaacgccgccgaaggtcatgacttggtgcccaaagagtcgtccatcgccatcggcgatcgtctcgacacggatatcgaggcaggcaaccgtggcggctatgattcgctggctgtgttgaccggcgtgaccaacccgaccgagcttatgctggctcccgaacacttgcgccccacgttcatcgcccgtgatctgcgcgagcttggcgagattcagagcgaaccggtgcgttgcgaggacggtacttgggagtgccgcaaggccagcgcatggtttgaaaacggacgggttcaggtcagtgatcccacgagtatggatggtcttcgtgctgcggtatgtgccgcttgggaagccgccgacaaaggcgcgcagatgaatgaatccatggtgccgaactttgtccttggagagcagcgatgaacagcgaacctcagtcagccggccgtacgccggtgtcgcaacggtacccggatcttgtggatattgacaatcaggacaatgaccgcaagctcgagatttaccgcaatgtgcttgactcattgcacagtgagctcgacgagagccgtgactgattgatgtcagaacatccgattgatcccgcaatgccgcttgaccgtcttgacatgatgcttgtggcctccgatctcgttgagtcccgatccaaggcgcagcgccttattaaggccggacatgtgcgtgttgacggagagaccatcaccaagccgtcattcatggtcaaagccggtcattgtgagcttgccgtggataagggtgatgattatgtctctcgtggcgcttacaagctgcttggcgcgttcaaggcctttgccgacgatgggctgaccgggccgcaaagtctggaatgtttggatatcggcgcatccaccggtggatttaccgatgtgctactgcgcgggggagcggccagagtcgtggccctcgatgtggggcatgggcagcttgacccgcgtattgcaggagatagccgcgtcatcgaaatgagcggcgtcaatatccgtgaagtcacggccgatgatttgccatatcgcccggcgatgatcgtgtccgatgtctcgttcatttcactgacctatgtgattccggtgattgcgcgcatcgccactcccggcgctcaggtggtgctgctggtcaagccgcagtttgaagtcggtcggcaaggactcggcaagcatggcattgtggacgatccggcattgcgcgagcagacccttgccgatgtcgtcgcctgtgcgcggcagcacgggctgcacgtcgtcaatacggccgacagtcccattgaaggcatgcacggtaatgcggaatatctgctttatgcggttttcaaatgatatcttcggcattctcggttgaccagcatcacacaggatgttcggtcaagacctattgaagtcgagcaaatagcatgctccaccatgctgttatcacacaatatggcaatgccggcttgtaacgtacggcacgtcagccgatgagcctcgatcttgttgacgtctatatgcgaggctgagctgcctccctcatatttcagcatgtcgaatctggtgaacatcgcgctgcgcaatggccggatctccagactgctgccgttgatgcgatgcccctgaagcacgccgtggagcagaatgttgcgcgcgcggatatgacggctggtcagcgatcccttaacgagcaaatcatcgttacacgtgatatctccgccggagtgcaggtcgccggtgagctcgatgccgccgcagatgatgctgccatcagtgatgattctgcctctgccggcaatgcgctcgacatgaacatcgccggaacatctcactgtaccattgtcgacaatcagctgattgccggtaatggtgtttgcctcaagcgtgccggtgaccatggtggtgcgaaaacgtacatcgtcggcgaatgtggtacgggtcgtcacggtaatgagcccataatttccgttacgtacgtgccctgtgttgccggtgtggtgatgcaagatacctcctgtgctttgcgtaccgcaagtgtcatcatcgttgatgagctaatgctaacgtttgcattatgggtatatggtaacaggacgggggtatcgcgagaatcagccttggataaagaggtcgatctgatcctgcttgcccatgatgatgagctcatcgttgcgatgcatgatcagttccttggaaccgtacgtggaattccttgccggggccttgatgccgaccacggtcacaccgtacttgtcatgcacctgcacatcctcgatgttgcgacccaccgcgtacagcggggtgtgaatcttcacgacgttgtatgggccgtcgatttcgatgtaatccagatagttgccagccaccagatgacccacgcgcttgccggcatcggtttccgcattgatgatatggtgggcgccaatgcgctgcagaatgcgggcgtgcttctgagagaccgatttggcccacaggtcggagatgccggcatccaacaggttgccggtgatgattacggaagcctcgaccgacaatcattgcggccgcaagaatgaacaggcatgctgggttgccggcgctggccacgcctgcggaataaccacccaatgcgactatcgaagcaagggtcatcacgccaagtccaccgaactggatggaaaacagaatgaccaactggccgaacatcgaccagtactcgccggtgttcaccaccggaatgccgcaggtggacagggcggaaaccgcggtgaagaacgacaccggaaagttgctgaagccatcgtgattcgtagtggagatgggcagcatcaataatccggtcgacagcaatatcaatacggaaaatacagaatggacaggcggcccggatgcctgatggggtgatccgtgagcgtcatgcgccggatgcgcttggaggcccggtcgtccttgttttggctgactacgtcggccgagtaccaccatgacaggcctttcgaggtctccttgtttgaggaggactcgtcaaagtcgttggacatggttcctgcttcccgccatactgatggcgtaatggtgtatggctgtaattgtaagccgaagccttacgataatcgactccgtggaacagcatgcggtgtgcaatagtatcgacgcccatatgttggccttgtctgatgtccgagggccggtgacgtgatgtggccgatggctcaggcgatgattaggatagtcatcagtgcgaccgattcaataggaggatgtccatggccaagcgcaatgcggttgtggtgacgcataccaggctcaggcagtccggcacagtggtgtccgaggcggtgagccagctgcgcagcgccggcttcgaagtcacgattatcgataacaccgaagctccggatttcggcgtaagtcccgcatgcgtgacggacgatacggaaatcgtcgtggtgctgggcggcgacggcacgattcttcgcgcggccgagctcgtgcattgcacccaggtaccgattctcggcgtgaacatggggcatgtcggcttcctggccgaattcgagagcttccagatcgacgaggcgattcggcgcgtggccgaacatgactattccattgacgagcgcatgatcgcccatgtcgatgtctggctacccggtgccaccaaacccatcgaggattgggcgctgaacgacatcactttggaacgcgccgaccgtggcaagatggtggagctctccattcgcgtggacgatgtggaaatgaactccttcggcgccgatggcgtcatcgtctccacgcccaccggttccacggcctatgccttttccgccggcggtcctgtgatttggccgaatgtcaaggctttgcagctgattccgttggccgcgcatgcgttgttcgccaggccgctgatcatcggctccggctcgaccttcaccatcgatatcctggacgattccatgtccgaaggctggatttgctgcgatggccgccgccagcgcgccctgccgcagggtacgcgcgtcatggtgcgcgaatcgcgcgataccttgcgcctcgcccgactctccggtgtgccgttcaccaaccgtctggtctccaagttcgatctgcctgtggttggttggcgtgagcatgcacgcaatgaggcctcgggccagccactgcatcacagacacacgttcccgactgccgctgatgccgtgtctgataggacggacgagcataacggcaaggcggagagctgatgctcgaagaactcgatattcgtaacctagggccgattcgggaagcctccatcgcgcctgcccgtggcatgacggccatcaccggcgaaaccggtgcgggcaaatccatgctgctgtccgccattcgtctggtgtccggcgatacggccgaatcctcgcgggtcgccgcaggagcagacgaggcatgggcgcaggcgatttttgcgctggacgatgatgctctagccgcagactccgggaaccatggtcaggacgattcttcacgtgatgccgatgacggcgatcctgcggacctcactggggtcgcggcggctgttgcccgagctcgcgatgcgggcgtcgaacccgaagacggtgagctgttcctctctcgcactgtgccggcttccggccgatctcgtgccgtacttggcggcaaatccgtgccgcgatctgtgctcggttccattgccggagaattggtgaccattcacgggcaggccgatcagctgaaaattgcctccgccgcacgtcaacgagaattccttgatcgtgtggccggcgacgaggctgagcttgatgcttaccggcatgcatggaatgagctgaccgccatggatgagcggttggggcgactgcgctcgcaggagtcctccgctcgtcagcaggcggactatttgcgtgaatccatcgaccgtatcaaccgtaccaatccgcagctgggggaggacgaagaactgaagtcgcgtcgcgagcgtatcgagaacgcggccgatatcgcccaaggagtgggcgcggcgttgggcgcgttggatgcctcacaggtggatgccgatgcgggtggtgcgtcggcggtcgatctcatcaatcatgcggtgacttcgctgcgtgcgattcgcgtcggcggcgagttcgtcgagcaggcggatcgattggaatccattaatgccgatttgggtgacgtggtgttctcgctcactcaggaattgggcgatgagggcagtgtcgaagaccttgatcagatcaacgggcggattcacgagctgaacgaactcactcgccgttgggggccgactttggcggatgtgattgcgtggcgcgacaaggccacgttcgacttggaggacctggacgcctcgccggagaaagtagccgaactggaggccgaacgacagtcgctgtacagcgcggctttggccgccgccgatacgctgagcgccgcccgtaccaaggctgccgcatcgctgggcgcccgtgtgaccgatgagttgagctcattggccatgtctggtgcgtcccttgaggtacgcgtcacccctcgagaattaagcgacggctataaaaacgaccgtgacgcggtggctggcgattcggcggggggcactgggcctctcgagccgtacggtcgcgacgatatcgctttcctgttcaccccgttcgagggttccgcacagttgccgatgggcaaaagcgcttcgggcggcgagctcagccgattgatgctggctctggaacttgtggcggcggacgtccgtggcggcaacgatcagaccttcatcttcgatgaggtcgatgccggcgtgggaggcaaggccgcggtcgagctaggcaaaaggctcgcgcgattggctcgcaatgcacaggtcatcgtcgttactcatctggcacaggtggcttcttgggcggatgcccagttcgtggtgtccaaggaatcgcaaggcgtgggggacgagacggctggcgttgcaaccaccgtcttggaagtacgtgacgatcaacgtgttcatgaaatcgcccgcatgctctccggcagcgaatccgaagcgtccctggaccatgcccgcgaattgctgaaggattccgcactatgaccaaagcggccatattcgacctcgacggaaccctgctcgactccatgggggtctgggatcaggtcgacatcgactttcttggcaagaggggcattgaggtgccgccggattacatgatcaaggtctcctccatgcagttccagcagatcgcggaatacaccattgcgcgtttcgggctcaaggacacgcctgaggaactgatgcaggaatgggacgatatggcccgcgtggcctactccaccacagtggaggccaagcccggcgcgctcgactatctgcgtgatctcaagagtgccggggcaaagatgggcgttgccacatcgttgccaccgcagctgcgagagccggcgttgcgccatgtcggcatgctcgacatgttcgatgacatcgtctccgtcgatgacgccaatgatgtcggcaaggaccagcctgacgtatatctgctcaccgccgagcggctgggcgccaagcccgctgattgcacggtgtttgaagacctgctggtcggtatcaaatcagccaagtcggtcggtatgaaggtatgggccatgcacgacgattcgtccgatgccgactggcccgaaatctgcgatatcgcggacggcgtcctcttcgatttccacgacgccccacgtccgttgtaagcacatacaataagcccctctgatgaggggctcccgcgaagcgggtgggggagaaaagtcgtggcatgagccgtgcgattcaatatcgggcacagcccgattccacttgcgcttactcagtccttaccgttgagcaatcctgccagactgcctttcggcctcaaaacgttgctcttccagctcctcaccctccacacgcgtggactcctcagcggcgatacgctccagcagcatgctgaccggcgcttcgtacaccacctcatcgaaccaatggccgccacgctccaccgcgtgctccgcgcgacccgtctctttgaatcccaatgactcatacatatgacgtgcccgcaggttgaacgaccacaccttcagcgtgatggtcttcgcgccaagctgccgtacccgtggtcctggtagtacgggccgatgagaatcgccatcgtggcattgtaatcgggcgcggtgcagtccttggcgatgatatggcccacaggatgcccgtccgggccgaaggttgtgcggccgaagcgccggtcgtcatcctcgtcgctccacgtatggaacatctggtcgatggtcttgtccggcactttctccatcgtatgacggcaatcgtcggcgatggcgtgatcgttccaccagatctcaagctccggataatcgttcggttcagtatggcgtagcgtaacggcgttgttcggtataggtacccctttccgaggccattgtaggcacggcccatgtttcgacactgtatgttggcgatgtgtttgttcactgtttagctgttatgtaacacaccttgacagttaagcagaacagttatactgtgttgtataacagctaaacagctggggtgctagtcaaccacaatcgaaaggggcataggtgaaactgatcatctcatccgtgtccggtgaacccatctacgagcaaatcaaaacccaaatccgttcggcggtgctcagcggcgagttgaaggcgggcgaggccctgccttccttgaggaaactcgccaaggagctgcgcatctccgtactcaccgtcaccagggcgtacaacgaactggccgatgagggcgtggtacagaacattcaaggcaaaggcactttcgtgatggacaagggcaacgaactgatgcaacgtcagctcgaaacccagattcgtgaaagcctggccgaggcaagccggggcgccaaagccgccggcattccgctgaacgcattggaccgcatgctcgaagaggaataccgcaaggaataacctcaagaaaggaccatggacatgaccgccatatccgaatccgacgcgatggcgttgcaggtcaccgacgtcaccaaacactatgattccggcttcacgctggacgacgtgaccttcgacctgcccaagggctacatcatgggactgatcggcccgaacggcgccggcaaatccaccctcatcaaactcatcctcaacatgatccaccgcgacgccggttcgattcacgtgctcggcctcgacaacatcgccaacgaggagcccgtcaaagaacaactcggcgtggtgtttgacttcagctacatgcatgaacagtggcaagtcaagaacattgaacgtatcgttgcgccactgtatccatcatgggacggtggatgctatcacaagtatctggatacttttggccttggtgacgcacagaacggcaagaaacatatcaaggatctttcccgcggcatgcagatgaagctgatgctggccatcgcattgagtcatgatgccaagctgctgattctcgacgagccgaccagcggactcgatgtgcttgcccgcgacgaactcatggatatcctgcatgcctacattgaggatggcgagcattcggtactgttcagcacccatatcactgccgacctcgaacgtgctgctgacttcattacctacatcaccgatggccgtctctactacaccggtccgaaagacgagtttgaggaatcgttccgcctgattaagggcggtccagacgaactagcacaactgcctgcggacgtagtgctgggctcacatacgtatgccaccggattcgatgcgctggtccggtcagacaggcttgatgctgttgcgtcggtggtttcggggcttgtcgttgaatcggcttccattgatgacatcattcgactgaccaatgcccatgattccaatcgtgacttgagcgggaggtgagcggccatggaggcaatactgagggtgtcgcggtctcggcaacatgcattgaccactgcattgcgcgtcgatatggcctacctgtgcgtcgacgtacggactgtgttctcgttgttgttggcaccgttgttctccgtcatctttcaaggtgaagcttatggtgatggcttcggctatcgcatgggtgtcatcatgacggtattcacctgcgccatgtgggtgctaaccatggcggttgctgacttacagaacggatatcgacttcgtggcattattccggcttcgaggaagagtcaggtggccgcgcgatatgtggttggattggtgatttccgtattgtcgatagcgatgattgttctgattgacgggttgcaagtgctggtcaatccagattggtcattcgcgggcaatctgtgggcggcgccgttgggaggtttctgcaccgcgctgatggtcgcgcttatcgtgcccacgggttatctgtggaccaaactaggcggtcttcaagtcacgatgatggtgatctatgtcgttgcattggctgtatccatactgctatctattttgcctgcttcggtgaccagaggattggcccatgccgcgaatgccatcatcgcgcaacgattgtggctggttattgcggtattgacaacgacggttgtggcatatggaatctcgtatgtaattgcctctcgcatatttgcttcaagggaatggtgacgatgaactggaaatccgtagtaaagcaatgtcgattcgattgtgccgggatgggtctgtttagcgtggcgaatatggtatttctgctggctctcccgatgctgtctatcgtggtatcgctggtgatgatatcgacccacgtcgatgaacacgttgccagtggtctgatgggcggactcggaggtttggcatcgacgatggcatgtatgagtgcattggggcctgcgtcatccgaggaatctgcagggcacagtgccatgcgagggctgattcctgtttcacgcactgcacaagttgtaggtcggtacctttttctgttggtggttggcctgctctgggctttggacgtggtgatatgcggcggcgtcttcattgtctttggcgatatagcagatatggggtggatcggtaccttggcagcaggtgctttcatcttcgctttggctatcattcttgggtcggtgctgctggcctgtgcataccggttcaccttccgcaagatgatggtggcctctgtcgcggtcatggttggcttgtatgccgtcattgcgctgctggcccgattgcctgttgactggcaatggcttttgctgaatattaccgatttcctgacgatctggtggcatacggcgcttgttctcgctgtgttgtgtctgctcgcatattttggctccatgcttatagccatccgcatctaccgagccaaagaactctagccgcgcatttgtccgaccgcgaatgaaaagagaccgacaggaatgatgaggtgccgtaacgaaggttttgaaaacaagtggtaaagacaatcggtacggtatattgcagaaaatctaaaacttaaatttggactgcaatgaaatcattatttgaacaactcggaggcacttataccctacaaggcgattactatctacccgaccttgccctaccaaccgaagaagaaacacaacctattggcatatgaggacagcggcataaacgctatttacaagaccataagcgagtgacttatacaaacttgcttacaagcggaaatttgaacgcttatcttgccgatattaacgagcaagcagaaaatatgttttctcgcttggtaaaagaaatggcgaaaatgcagggtgtaactgagcaattaaagacaaagaaccaaatggtgtgggtgggtaaaatgaactcaatccgcaacgcagctatcgaagtggtaaacaaggagattatatttgcataaaattaatagcctcagaccgttttggcctgaggctatttttctgaaatcagtaaataatgtttccttcttcatcaagtttatatatttttataaaccacttataaactcggacggaccttccgctccacgatatggacatatagccgtttctctatctttacctccgggataaggattgcccgtgcttttgtaagcgtattttttttacgttattgaggttgcaggtataagggtgtgagttatgggcgattttgcgccgtaactcgcacccttatacctgcaattggctaaatgaaccctttctacctgcaaaaatgctccgtaattggtaccgaaatacctgcaatatgtgagagatacgagaattggacgttctgacggatctaattcgaccctttatacctgcaatgactcgacgattgaccgaactgaatattcgttgcaggtaattcggtacttattaacggaagcccacaagaaaatagcgcctgacacatgcctgacaatgcccgtgcatactcggacgcttggcttgcggcatcaaaaaaccgatacgcgccggtaaagcacgtatcggtttcaaaaaatgaccgttatacaaacgtcacgtggactattacagtgactgggcggccttttctacgtagtcctccatgccgtcgatggccacgacgtccttgaaacgcacgtcggcggtctcgaggccacgcaaggcggccggggcggtggtgccggtctcgcgggccagcacgtccatgcattcgaagtcggtgccggtggcgtcgaagcccagagcctcgttcaccacgcgcgggaacttgtaggggctggcggtggagagcagcacgcgcggggtcagcggatcgcgcggcatctgctcaagcaggtagtagccgcaggcggtgtgcgggtcgattacgtagtggttctcatcccagcagtgcttgatggattcgcgcacctggtcctcgtcggcccaaccggtgccgaagatctggcgaatcttggccagcagctcttctggaatctcgtacgtgccccactggttgaggtcgttcatcagcatggagatcaagcgtgtgtcgccctcggacaagtagtacagcatgcgctccaggttggaggagatgaggatgtccatcgagggggagatggtctggaagaacgggcgctgacggttgtaggtaccggtggtcaggaagtcgaacagaacgttgttcttgtcggaagccaccacgaggtgcttgaccggcaggccgagcagcttggcgtagtagccggcgaggatatcgccgaagttgccggtcgggaccacgaactcgacctcatcgccaacgttgatcacctgatcggctagcagctgggcataggcggagaagtagtagacgacctgcggcaccagacggcccacattgatggagttggcggaggaaagcaccacgtgagcattgccggcgagacgctcggccagggcacggtcgccgaaaatgcgcttgaccgcggactgggcgtcatcgaagttgccttccacagcggccacctgcacgttggcgccggtctgcgtggtcatctgcagttcctggacctgggagaccttgccttccgggtagaagacggtgatcgcggtgcccggggcgtccgcgaagccggccagcgcggccttgccggtgtcgccggaggtggcggtgagaatcatgatcttctcgtccgcgtcgccgtcggctggcatggtgtgcgccatgaaacgcggcagaatctgcagggccacatccttgaatgcggaggttggaccgttgaacagttcgagcacgtaatcgtcgcccaaaggcttcaatggagtgatacgctcgtcggaccactgctcgccataggcatcggcgatgcactggcccagttcctcggcggtgaagtccggcagcagcgcgcccagcacttcagcggcgatctgctggtaggtcttgcccggcagcgaggcgacatccaccttggtctcgcccaatgcgtccgagacgaacaggccgccgtcgtcggcaatgcccttacgaatcgcctgcttggcggtcagcgaatcggtggtgctgcgagtggaatggaaggtggtagccacggttgaatccttattctcgggaatgaaagatactacaaatcttcattattctatcgtctgcctcggtcagacgtcgcggacgtctcgttttgtctgtctagcgacagaaattcaggaaattcgtcctatgctcctaaatttctgtcgctgagaagtactcagtgacaggaatttaggattaatgggtttatttccgagaattctgacgctgagcggagctgagcgacagaaatttagaagtataggggtcatttcctgaaattctgtcgctgaaggatgctggagggatagtgatgagggcaaaaggtcagaaaatatagtcgcggggcgcaataaccacggaaattacgctgcgttaggccatttggtgagttaggcttgaatgttatgagtgatgaactgagtcctgaggtattcgacgcggtgtgccgtcaggccgatcaggccgcgagcgcacagcaacgccttgcccaggcgaacgccgaagccaagaacgagctgctgctggccattgcggatgcgctggatgagcatgccgccgatatcgaggccgccaatgcgctggacatgcttgaatccaaggaaaacggcatggacgcgggcaagctcgatcgcctgcttttcgatacgccgcgcgtggccgccgcagcccaaggcgtgcgccatgtggcaacgttgcccgatccggttggtgaaatcgtgcgtggctataacctgcctaacggattgcgcctcacccaaacgcgcgtgcccgtgggcgtcatcggcatgatttacgaagctcgccccaacgtcactgttgacgtggccagcctgtgcctgaagtccggtaatgctgcgctgctgcgaggtgggcatgccgccgaacgtaccaatgccgccaccttgagcgttatcgccccagtgctggaagctcacggttttgatccggctctggtgcagtccgtcgaccagtacggccgtgccggagccaccgccatgatggaggcccgtggccatatcgatgtgttggtgccacgcggcggtgcggggctcatccaagccgtggtgcgcaattccaaggtgccggttattgagaccggtgccggcaacgttcatatctatatcgacaggtccgcagacctcgtcaaggccattccgattgtgttgaacgccaaaacccagcgtgtgggtgtgtgcaatgcggccgagaaactgctggtgcatgagggcgtcgccgctgaattcctgcctcagatcgccgcagcgttgacgcaggcgaacgtcgtgctgcaagcggatgaaacttcgtacgacatcctcgaaggcgccgccattgaagggcttgaactgaatcatgccaccgaggaggactggaataccgaatacctggcgctcaagatgggcattaaggtggtgccagacctagaagcggctatcgaccatatcaacactcattccaccggtcacaccgaatccatcattgccgaggactatgcggccatcgaggaattcaccaagcgcatcgactcggccgtggtcatggtcaacgcctccacccgtttcactgatggcggtgtgttcggattcggcgccgagctcggcatctccacccaaaagatgcacgcgcgcggacccatgggcttgagggaaatgaccaccacgaagtggattggctacggagcggggcaggtgcgcgcatgagcgagaatgtgaagagcgaggacaacgccgcagttgagctacggccggatattgatctcaacgatcccaaactcaatctcaagattgcggctgagcgcctgagcattgtgcgctacgtgtttctcgtgcagattgaggatggcatcgcttcggcggcgcagcgagcgtcgctcgagtacgcggatgcagtgcttatcggttggccggagaatgaatcgccggagattgcggatttgactgactcccagctcaaaaccgtgcgcgaacacatggatctgatggaaagctacatcgccaaatacacgcagatggagcatgatggcgatatcgatggcatgacggacacgctgattcgcatcaccgaacgcgtggccgaggtccgtcgactgtatcagccggacttccctctgcctacgttcgctgagattcgccgcgtggtgcaggatgagtgggacgaagacatgggtaagatcgatcccaaggaagacaatcccaccgccaatgaaatcgagcaggaaaccgaaagcgccaacgaaggcggcgaaggcggcaaggcatgagcagcagcgatccggctgaaatcattgctgtcgcacagggcgaagccgaacggcgtatgtctgatctgtctgtgccgggcggcgcgaatagccatggcaaaggtcgcctttccgcgcgcggcaattggcacacgcgtctgcgcatcggcattatgggcggcacattcgacccgattcacaacggccacttggtcgcggcgtccgaagtcgcatgggtgtacgaccttgatgaagtgattttcgtgcccacgggtcggcctgtattcaagcttgataaggaagtcaccaacgccgaggaccgctatctgatgacagtgattgccacggcatccaaccccaagttcaccgtatctcgcgtggatatcgaccgcccaggtgtcacctacaccatcgatacgcttaaagacattcgcgcccagcatcccgatgcagagttgttcttcatcaccggcgctgatgccgtggctgagatcatgcagtggaaggacgccgacttgatgtgggatcttgcccacttcgtggccgtcacgcgccccggatattccagcccggatggcgtcacgctgcctgaaggtaaggtcgataccctggaaataccggctttggccatctcctcaaccgatgtgcgccgtcgtgccgagcacgacgaaccggtctggtatctggtcccggatggcgtggtgcagtacatcggcaagcatggcctgtattccaagcagcactgacggcaaccgcagcggatcgtttatgccaaccccatcttgattttcaacgtcatcacacgaatcgccgactgagtgaccttattggcgaaggcgggatccgatgccgcccgcgtagacaatccatccagaatcggcgcgacatagttggtgtctccgatgcaggccaaatcgccgccggcttccacgagtttgactcccaattgagtggtgtcataggcgctcacagccgctgccgacatcgaatccgaaatcactacgccgtcatatcccagatcgccgcgaagatgcccgtcaatgatgattgaggaaaacactgcgggatcattggggtcaatggcctgataggtggccaatgccatcatcaccatggcagggtcggccttatcgatggtggtgtcaaacgccttgatttccgtgccatccaaggtggtggtcgtatccaggatgccgtcggtggtgaaatccgtgttgccggtcaccgcgcccaatcccggataatgtttgatggcggactggactccggcattggccatgccctgcacaaacgccgtgccatgagccgcgttgcctgccgcgtccagtccgaaatcgcgatagagcgcaccaatgggggcgttggcggcccgattcaccactaccgtgcccagcacgggtgcaagatcgacattaatgccggcggctgccagctgtgagccccatacgctggccgattgacgcaactgattggtcgacatggttccctgatccactgccgtgggcatccgatcaaaaccagggccggtcagatgctgtacccagcctccctcttgatcggtggagataatcaggcggttatcaccgggagcatacccctgcaactggtcggctgcagcccgcactgaggcaacccctccggtccatttgccgatgatgagcaccgatcccacatggcggtcggcgatgagtgaagacagcgaggccggggcgttgccggcatacagcggtgccatcaccaactgaccaattcgagtgtccatatccatggcattgaccatgcgatgagctttgctggcaggggagggatccggcttgggggtcgccgaacgtgccaactgctgcggagtgttccgtgcagcgtctgctgtagcggaatttgccgcggcatcatttccagtcatcgatgcaaaccagccgatgcgccatccatacagcgccgtgactaccagcgctagtacgcacaatacggatccgaccaacacgccccaatgcgaagtcctatggccatcccgataggggcgtgccgacggttgctcaggacgattgctcataatcttccagcataggggaatctcatacagcttgctggcaatccgctggcagtatgtgttcagggtttgtgaggaacccgccaagctgaatacaagccgaaatccagtgcgctgtgctcagggcataacctactttcccgacctttcgctacgcttgaatcatgtcttttaatgatcctttctcaatactgttcggcaatggcggcggttcccggcgcaataactcgaatgatgatgatccgatcattcttaatgttgaggccgatggagacacccccaacaggaatggttccaacccctcagggcgaggtccggccggtccgcgcttgccccgcagaccctccggcagccatggcaacagccgaggcaccaaaatattcatcggcgtggtgctggcattggtcatcatcgtcgcactgttcttcggtctgtcccgattcatcaccgatctgatgtggtacggacagctcggcttccaatccgtggtgtggacccagctcggcgtgaaaatcggtctatgggtggcatacgcattgctgatggccttgaccggttttatcgccgcatggctggccattcgcgcccgcccggactccgcggatggctccacgattcgcatcaatggtgatgtggtggaagtcggcaaatcggcgagctccaagaccgcacgtcgcgtggccgtggtgatttcgctgattgtcggcgtgattttcggctcccagttcaacgcgaactggagcgagatcctgcttatgttcaacgcgcagaagttcggtaccactgacccgcagttcggactcgacaacggcttctacgtgttcgtgctgcctggcctgcagctcgtgctcgcagccgtagccatgctgctgggcgtaggcctcgtgttctcattggtcacgcatgtgctgatgggcggcatccgcatcaccatgccggtcaacggccgtggcctgttctccatcaccaaacgcgctcgccgtcagctcggcatctgtctgattcttaacatgcttgcgtggtccgtacgtcaggtgctgggtgttttcgaacagctcaccgtgcagggctcgcgtatcactggcgcttcctacaccgcagtgcatgccaacattcccgtcaccttcatcatggccgcattgaccgccatccttggcgtggtgctgggcgtatggctgatgcagtcccatgcgcttgaaggccaggcgtccatcggtgtgcgcgcctctgctgctctcaaggcctggcgcgtgccggtaactgccatcgccgtcaccgtggtggtcggcatggtgctcaccattgcttggcccatgctgctgcagcgtttccgcgtcaacccgaatgcgcaggagatggaatccacttatatccagcgcaatatcgacgccactcgtgccgcctatggtctcgacaagctcaagaccgagcaatacaaggtgaccgacaagggcgagcagggtgcactggccaaggaggccgacaccaccgcgcagattcgtctgctcgacccgcaggtcgtcagccccacgttcaagcagctgcagcagtccaagcagtactacaccttcgccgacacgcttgccgtcgataagtatgagattgatggcgtctcccaagacaccgtgatcgccgcgcgtgagcttgacctggctggcaacgacaaccgcaactgggtcaacgaccacaccgtgtacacccatggttatggcgtggtggccgcttacggcaacaaggtgactgccgacggccagcccgaattctttgaatcgggcatccccacccaaggcaagctcaccgagtccgaaaagtacgagccacgcatctacttctcgccgaacaccaccgaatactcgattgtcggcgcacctgaaggcacgcaggcttgggagttcgattacccgaccggttccgaaggcgctttgaccacgttcaagggcgatggcggaccgtcggtcggcaacctgttctcccggattctctatgcaatccgcttcggttcggaccagatcctgttctccgaccgtgtgaccagcgaatcccagattctctacgaccgttccccgaaggaacgtgtggccaaggtcgcgccgtacctgacgcttgacggccgtgtgtacccagctgtggtcgatggccgcgtcaagtgggtcgtcgatggctacaccacctccgacgcctacccgtattcgcagatgaccgatctcggcaatgccaccaaggactccaccacggtgtcttcgtcgacggtgtccagcctgggttcgcagcaggccaactatatccgtaattcggtcaaggccactgtggacgcatacgacggttccgtggacctgtatgtgtgggatcaatccgacccggtgatcaaggcgtgggagaagatcttccccggccagtatcaccagttgtccgaaatctccggtgacctgatgagtcacctgcgttacccggaaagcctgttcaaggtgcagcgcgaactgctctccaagtaccatgtgacttccgccaaccagtactactcgggcgaggacttctggcagacgccggtcgaccccaccgaatcacagtcccagcaggatcaggacatcctgcagccgccctactacctgaccttgcagaccggtggcaccaaggagccggtgttctcgctgacctccacctatattccggccggccagtccactcgagagattctgaccggattcctttcggtcgactccgacgccggtaatgagaaaggcaagataggaccgaattacggtaccatccgattgcaggagctgcccaaggattcgaatgtgcccggccccggacaggcacagaacaatttcaacgccaatgccgacgtgtccaaggaactgaacctgttgcagtccggtgacacgcaggtggtgcgaggcaacctgctcaccctgccgctcggtggcggcttggtgtacgtgcagcccgtgtacgtcaagtcttcgggtgccacgtcgttcccgctgctcaagaagacactggtggtattcggcgatcaggtcggctttgccgacacgcttgatgaggcgctcgatcaggtgttcggtggtgactccggtgcagcggccggcgatgccgagaatgtgtctggcgacggatcatccgactcctcgaacaccggcggacaggatgccagcaatcagtccggctccgacacctccggcgaccagtcccagtctgatggccagtccggcaccacggacggcaagtcggattctggcacgtcatccgggcagtccggcaccgctcgcagtcccgaactccagcaggcattgaacgatgccgcccaagccatgaaagacagccagtccgccatgaagaacggcgattggaccgcctacggcaaggcccaacagcagctcgaagaagccctcaacaaggccatagagctcgacaagtagttcaccgaaacaaggtggctcccgctgtcgggagctgtcagcgcagctgactgagggcggtcaagagtgactaatgctatcaccctcagtcgcggataagccgcgacagctcccgccagcgggagccatgctattgtctggagtcatgccatacactttccgtccagccgccgagtctgatatccaagccatcaccgacatctacaacgcctcggtggtggtcggaggagccaccgcggacctgactccgcgcaccctcgaccagcgccgtgcgtgggtcgaatcccataaacctccatatggcgtattcatggcggaatcagagggcgggcaagtcatcggctttggctcgctctccgtgttctacgatcgtgccggctatgacggcgtcaccgatctcgcctactacatcgcccccgcacggcaaggcaggggagcgggcacgttcatgctggataatctcctacgcgaggcccgcgcccgtcacatgcgcaaagcctgcggcatcatctttgccgacaacgccggctcaatcgccctcatgcgacgattcggcttcacccagttcggcctcatgcccgccgccgccaccgactccaccggcaccatgcgtgatatgtcctactggtatctcgacctctaagtacaatcgttgcgtttgtaggctggcgagacaagacgaggaacggatatggcatcggatttttggctgattgcgggactgggcaacccgggcaagaaatatgaggacacgcgacacgacatgggcttcatgacagccgacgtgctcgccgaacgctggagcgtgaacttcgccgatcacaagggtcttgccatgctcggtaagagcacgatgaatcttgacggtcgcaccatcaagttctttctggccaagccgttgacctacatgaacgactcgggcaatgccgtggcctccatcagcgcctactatcagatcgagcccgaccacatcgtggtgattcacgacgacatggacttggaattcggacgcatcaaggtcaaggctggtggctccgcgggcggacataacggcatcaaatccattgaccgttcgcttggcacaccgaaatatgcacgtgtacgtatgggtgtcggccactccaagcgtggtgcgcatgcccatgacaacacggtgaactgggtgctgggtggctttggtccggatcagcgcaagcaactgcctgaattcctggctgatggtgccgatgccgccgaaggaatcatcttccatggtcttgccaagacccaggagaagttcaatggccgctaaggcgaaaacttccgacacgcagtcttcccgtggacaagcggcagacagccggaccgtgtatccggatctgatcaacggctcgcttgccggcatactgtccgaacttgagcgggacaagacattcctgagcctcgccgcaggcgacatcgaagcttcggacgacgtcgacaattccattctggccggtgtgcctgagggtcttcgcccggcgctggccgcggccattgctcagggcacgaacggcaactcaggcaagccggtggtgttggtcgtggcttccggccgcgaagccgaggaaaccgtgggatcgctgcgctcctggtatgacggcgacccgaacgatatcgcccagctcgaggcgtgggaaaccctgcctcacgagcgcctgagcccgcgcgcggacaccgtggccagccgtatggccgtgttccgcagactgaagcacccgagtgacgccaatccgatgttcgggccgattcgcatccttgtcatgccgattcgctcgctgattcagccggtggtccaagaccttggcgacgtcgaaccactcgtattcacggtagggaaggatctgccgcttgacgaggcagccaagcgactcatcgaaaacgcctacacgcgcgtggaactggtcatggatcgcggcgaattcgccgtgcgtggcggcatcctcgacgtgttcccacctaccgcgccgcacccggtgcgtatcgaattcttcggtgacgaaatcgacactatcaaggaattccacgcttccgaccagcgcacctatggcgaggggctcaaaaccatctgggccaccgcttgccgcgaactgcaattgaccgatgccgtgcgcacccgtgccaaggccctgatcggttcgattcccaacgccgaagacatgctcgaatccatcgccaacgccattccggtcgaaggtatggaatctctgatgcccgcgcttgtggatcacttggaaccggtgggctccatgctgcccaagcatgctgtggtgctgcttagcgaccctgaaaaactacgccgttccgctgaagatctggccaaaaccgccaacgagttcttggccgccagctggcatgtggccgcatccggccacggcgccggcgcgcccatcagcttcgacgaagccagtttccttgactatgcggagaccgtcagttcgcttgaatattcagagcatccggtatttcgtctcaccagtttcggtgtagacaccacactggccggccatgtgcagctcgacgcgcagaatccagcggaattccgaggagacgaggctaaagcttcgcagggcatcgacggcctgttggatgctggcttccacgtcaccattaccgccgctgccgccggtaccttggcccgtctgaagcgtgcgctcaacaccaccggcatcaccacgttcgataccatccggtctcaggctatcgacggattcgtggacaatgccgccaaaatcgccctgctcaccgaacgcgacttgaccggtcgaagctctgcggttgctgtggccaaaacgccgaaacgccggcgcaaggccatcgatttggtggaactcaaaaaaggcgattatgtggtgcatgagcagcacggcatcggccggttcgtggaaatgcgccagcgcaccattggcaccggcgccaacaagaccacccgtgaatacctggtcatcgaatacgcgccttccaagcgcggtgcaccggcggacaagctgttcatccccaccgatcagcttgatcaggtcagcaaatacatcggtgccgaggcccccaagctcaacaaactcggcggctccgactgggcggccaccaaggccaaggcccgcaagcacgtccatgagatcgccgacgacctaatcaagctgtactccgcccgccagcgcgccaaaggctttgcattcagcccggacactccatggcaaaaggagatggaggacgccttcccctatcaggagaccgccgaccagctcgccaccatcgacgaggtcaagtccgacatggaaaagcccgtgcccatggaccgtcttatctgcggtgatgtgggcttcggcaaaaccgaaatcgccgtacgtgccgcattcaaagccgtacaggacggcaagcaggtggcggtgctcgtgcccaccactttgctcgttcaacagcatcaggaaaccttcgccgaccgctttgaaggattcccggtgaatgtggccgccatgagccgcttccaaaccaccaaggagatcaacgcgatcatcgaaggcctggaaaccggcacggtggacgtggtcatcggcacacacaaactgctgaacccgaaaatcaagttcaaggatttgggactcgtcatcatcgacgaggagcagcgtttcggcgtggaacacaaggaaacgctgaaagccctgcgcaccaacgtggacgtgctatccctgtccgccacgcctattccgcgcacgctggaaatggccgtgaccggcatccgtgagatgtccacgctcgccacaccgccagaagaccgcctgccggtgcttacctatgtgggtgcctacgaggacgcgcaggtcaccgcggccgtacgccgagaactgctgcgcggcggccaggtgttctatgtgcacaaccgcgtgcaggacatctcgtccatcgctgacaagattcacacgctggtgcccgaggcgcgcgtcggcatcgcccacggcaagatgggggagaagcagctcgaccagatcatccgcgacttctggcatcgcgacatcgacgtgctcgtatgcaccacgatcatcgaaaccggtcttgatatctccaatgcgaacacactgatcgtggatcatgccgaccgattcggtctgagccagcttcaccagttgcgtggccgtgtgggccgtggccgcgaacgcgcctacgcctacttcctatatgacccagccaaaccattgaccgagcagtcacacgaccgactcgccaccatcgctcagaacacggccctcggctccggcttcgacgtggctatgaaggatttggaactgcgcggcaccggcaacctgctgggcgatgagcagtccggccatatcgaaggcgtgggcttcgacctgtatgtgcgcatggtctccgaagccgttgaaaaatacaaggaacccgatgaggacgtcgagccggtgtccgtgtccatcgatctgcctatcgaggcgtcgattccgattgactacatcgattccgacaagctgcgtttggaggcataccgcaagctcgcttccgcacgcaatgaagccgacctcaaggatttgaaagaagaactcaccgaccgttacggcaagcctccggtcgaattcgaaactctcttcgacgtggctcgcttgaagttcaaggcgcgcgagctcggcgtttcggagattctggcgcaatccaaccgcgtgcgtatcggacgcattgacccgcccgaatccattcagatgcgcatgacgagaatctacaagggcacccaataccgcccggtcactcaccagctcatcgtccccaccccgttcaccggctccctgggccaaggtcccatgagttccgatcaagtagttctttggaccaatcagctcctcgatgacttggcatggaggccacgacgatgaaaaaccaacacacggcaacacttgccggctacgaaattcctcgactcggcatgggcacgatggcgctcgccatcgaggggcggccgaccaatcgtaatcaggcgatcgagaccatccatgccgcgctggatgccggggtccgttaccttgacacggcgtggtcctattacctgcccagcaagccaggaaccggcgagccggaggacatgggatatggcgaatacttggttcgtgacgcgttgaactcgtggcacggcccgaaggacgaggtgctcgtggccaccaaaaccggctggttgcgcacgctcgacaaccatggaaactatagctggcaggccgatgcccgccctgaaaccatgattgccaacgccaaggaatccgcacggcgcctcggtgtagaaacgctcgatctgctgtactcgcattgcaacgatccgcaggtgccctacgaggaccagatgggtgcgctcaagcagctcgtggatgagggcgtggtcagagcggtcggcatctcgcgcatcgacaacaaggacatcgaaattgcccataccattctgggagacaggctggtcgccgtccaaaaccagttctcgccggtccaccgcgatcccgaccacacgatggaaacctgcgaacagcttggactggctttcgtctgctggtcgccgcttggtggcttcctcgatcctttcaatgagcatctgttcgaccgattcaaggaagtcgccgacaatcacggctgctcctaccagcgtgtcacgcttgcttgggagcttgcacaatatggcaatctgtttacgattccctccgctagaaacccacaggagattcaggactcgttcaaagcggtcactcttgaattgtccgatagcgagatcgactatctcaatgatgtaatcagcgcctaagcgttttcctccaaagttgactgcaatcacgcggcacaccgacattgtgagcgctcacaccaaattttgggcgtgttgttcacaacgtccacaaatcgcactactcttatgaatgtcattcaagatacacaaccgttttaaggagtagttgtggcagcaattgaaagcgtgtacgcacgtcagattctggattcccgtggcaacccgaccgttgaggtctacctggagaccgaagacggtgctcagggcaagggtctggttccctccggtgcttccaccggtgaggccgaggcttgggagcgtcgcgatggtgacaagtccgtctacggcggcaagggtgttctcaacgcggtcaaggccgtgaacgaggtcatcgccccgaagatcatcggcatggatgccgctgatcagcgcgccctcgacgacctgatgatcgagctcgacggcaccccgaacaagggcaagctgggcgccaacgccatcctcggcgtttccctggccgctctgtacgcctccgctgagtccgcaggcctgccactgtaccgctacatcggcggcaccaacggccacatcctgccggtcccgaacatgaacatcatgaacggtggcgctcacgctgacttcgccaccgacattcaggagtacatgatttccccgtacggcttcgacacctactccgaggctctgcgcgctggcgttgaggtttaccacaccctgaagaacgtcctgaagaaggaaggcctgaacaccggcctcggcgacgagggcggcttcgccccgaagatgaagtccaacgaggactccctcaagtacatcatggacgccatctccgctgccggctacgagcccggcaagcagatcggcatctgcctggatgtcgcctcctccgagttctacaacaaggagaccggcaagtaccgcttcgacggtgaagagcgcgactccgcctacatgctcgactactacgagaacctcatcaacgagtacccgatcgtctccatcgaggacccgttcaacgaggaaggctgggaggactgggctgccattaccgctcgcctcggcgatcgtctgcagttcgtcggcgacgacctgctggtcaccaacccggctcgtctgcagaaggccatcgacctcggcgccgccaactccctgctggtcaagctgaaccagatcggttccgtcaccgagaccctcgacgccatcgagctggccaccgccaacggctacacctccatggtttcccaccgctccggcgagaccccggacaccaccatctccgacctggctgtcgctaagaacacccgccagatcaagaccggtgccccggcccgtggcgagcgcgttgccaagtacaaccgcctgctcgagatcgaggaggagctcggctccaccgctcagtacgccggctacagcgctttcaaggcctgcaagaagtacctggtcaagtgaattgaaacgcccgtaaaggcgtgatattcagcgcaagcttgatgcccgtcgcattcgtcaagtcgaatgcgacgggtattttcgtgtgtcatgagcaagtcgttccgcaccggcaagtccggtaaatctggcaaagtcggtaaacccggcaaagcaacggccagaaagaaaaacagtgcgggaccaatcgcatttttcgtttccctgtttatcgtggctcttggcaccattcaattggtttccacgtttcacacctatgcgctgaaccttgccgaactcaatggcctcaaacgagaggaagcctcgttggtggccaaaaaacaggaattggaaaacgacgtcaaacgttgggatgacaaagcctacgtcaccgcccaagctcgtgagcgtctcggctttgtgtttcccggggagaccgcagttcatgtgcttcatccggaagccgtgaccggtagtgaggattccgagtctgattcgtcctcgtcctcggaatccaacaagaaagtgctgccatggtacagcgagctcgcctactcgttcaagaaagccgacgagcctgtgtctcaatcaaaaaatgacagctcgggcggctctgattccggcaatacgcaggatgaacagaacaacacgcaagacagcaatcagaccaacacaggggagggaacccagcagtgaccatcgatatcgacgccaaggccaaggctctcgttgacgcgattcttgccgaacccgcgaccgaccatgacatcgatgtggtgcaacgccagcttggacgctatccgcgcggcatggttgctgtgggtgcccgatgcgtatgcgggcgtccgctcgccgtcatcacccggcccgtgctgcccggcggcataccattccccaccacctgctacctgacggggcctgaggcagtcaaggccgcctcccacgtggaagcggccggcatcatgcagcaatacaacgacatgctgggcgccgacgaggaactgcaggccgcctataggcaggcacatgaactgtatctggccttccgccatgaactggcaacccgtttgggcgacagcgaggagcacattgaggggacctcggccggcggcatgcctgtacgtgtcaaatgcctgcatgcgctactggcccaatcgctggtcatggggccgggagccaatccaatcggagacatggtactcgaacgcatcaaggatgagttcgaccccgtcctctgtcgctgctcgctggaggactgagcaacgatttcgcgcatgacacgtgtgccgttgtccgcacaagaagaagaggaaagcaatgagcaaggaatccgtaaccgttgccggtattgattgcggcacgaactccatccgattgaaagtcgcgcgcgtggacgccgacggcatgcatgaagtcgtaccccgcatcctgcgggtgattcgactcggtcaggacgtggacaaaacccatcgttttgccgacgaagcattggaacgcgcgtatgaagccgcccgtgagttcgccggtgtactcgccgagcatccggtcgacggcctgcgattcgtggccacctctgccacgcgcgatgccgagaatcgtgaggaatttgaggatggcatcgagagcatccttggtgtccgtcctgaagtcattcccggtaccgaagaagccgatctcagcttcttgggtgccacttccgtagtcaaccgagatgatttgccggcaccctatctggtggttgatttgggaggcggctccactgaactggtgatcggcggtgatggcgtgaacgcccccaccacacaggtgcagggtgcattttccatgaatatcggatccgtgcgcatgaccgaacgccatctcgtcaccgatcctcccacacaagcggagattgatgaggcgatagccgatatcgacgagcatatcgatgaggcgttccgtactgtggacgctggcaaggcacgtaccatcatcggcgtgtccggtacggtgaccaccatgaccgccctggccatggggttgaaggaatacgatcacaccgtggtcgatggccatcgactgagccttgaagatgcgtacgcagtggatgaccgattcctgcgcatgacccgagccgaacgcagcgcatacaagaccattcatccgggccgtatcgatgtggtcggtggtggcgctgtggtctggagccgcgtgctcgccaaagtgagcgaggcggcccaagccgatcacggcgaggccatcgactcgttcgtcgcgagcgaacatggtctgctggatggcattgtgctcgattatgggcgccgtcttctcgctcggtagcgtacaataactaagccggtgaaaatccggcaggcctccatggcgaaattggtatacgcagtcgacttaaaatcgaccgcttcggcttacgggttcgagtcccgttggaggcaccctcactccccgtgatcagcatcgtttgccgcggggatttttcgtatcggtcgccttcccgaaacaaacagccgttagtctgtgtgatgttgtgacgatgaatctgatgaaatgagggaacgcgcatggcttcacgctggaccgacgtcgaacgggtcgatgagggcgccttgcccaccatgctcgcccaggctgtcatcgcaggcaccgcgctgaccatcggcgccatcgcctgttccggcttctacctgtccatgatcggcaatgtggtggctttgctgccgtggatgaccgtcatggtgctgatcgccgtggctttttcctacgtcgtcggattcgctttgctatggtgctccgaagcgctgaccatgcgcatgaaggacgccttcaagccgtgggcctatggcgtcgtgggactgctcggctatggcatctggggcatgttcgtcatgagcgccatgatgaactcgctcaaccagccgttgaacggcgtggtattggctaatggcgatgtcattgccctgaccgtcaactatgcggtgttcggattcatcgcgttcctgctggcgcaggcgtatgcgccgaaaatcgccactaaaaagggtttgaccgttgggctcatggtggtgcagatcgcgctcgccatcatcggcatcatcgtgctggtgatgatgttctcggcattgtcccactaaagcattctcggccgtgtcgcactgaaactggcacagagccgaagtgccgtgtctccttcgcggcacggacgtatgctggtatatgtcgttaatggctatacggcgacgcttgttcaggagaaggagagctattgttcagcgtgcttgacatgttcaccatcggcgtgggtccctcttcctcgcataccgtggggcctatggcggcagcatacgcgttctcttcctcgttgcagcagcggcatgtgctggatcgtgttacgcgcgtcaaaaccacgctgtacggttcattggccttgactgggctcggccacggtaccgatcgcgccgttatggccggactcgaaggcaatgtaccggccacagtggataccgatcatatgctgcatattcgcgagacctgcgcgctggataacaccttgaatctcgccggggccaagcgtattcatttcgattatgaccatgacgtgattttcgagcagtggaagcgcatggccgcccatcccaacggcatgcgattccaggcattcgatgatgccgccaacttggtcgacgaacaagtctggtattccatcggcggcggtttcatccgtcagggtgcgcccgatgattccatgatcggcatccatgaccgtcctccggccggcacgtccttcgccgatgaagacgagtccgctgtggaacccgtaaccgaggtaccgtatccgttccattcctgtacggaattggtggcactatgccggcgtcacgatatgagcattgccgatatcgtatgggccaatgaaaccgcgctccgcccggaagaggctgtcaaggccgagctagatggcatatggcaggtgatgcgcgactgcgtgagccacggctgcacatccaaggagacggtgctgcccggcggacttgacgtaccccgacgcgcgcccaagatgtatcagcgtcttgctttcaactccgatgtgcttcgccgcaacagccgtcgtaaggatgccgtgctggaatcctcggatgccgcatgggtggatctatttgctctggctgtttccgaggagaacgccgggggaggccgtatcgtcactgcgccgaccaacggtgcggcaggcatcatccccgccgtgctccactattattggcacttcgtggacgatgccgatgatcagggtgtggccacgttcctgctgaccgccggagccatcggttacctgttcaaacgtaatgcctcgatttccggtgctgaagtcggatgccagggcgaggtcggctcggcctgctcgatggccgctgcaggtcttgccgctgttatgggcggcacacccgaacaggtggagaacgcagcggagatcggcatcgagcataatctggggctcacctgcgatccggtgggtggtttggtgcagattccctgcatcgaacgcaatgcgatggccgccaacaccgccatcaatgcggtacgtatggccatgctcggcgatggctcgcatatcgtgaccttggatcaggccatagccacgatgaagcagaccggcgaagacatgatggccaaatacaaggagacgtccaaaggcggtcttgccgtcaacgtcgttgaatgctgacttccgcaggtttgccaatagtgctattgtagggcgcattgtgtctgtgaaggaggactcatggcagatcagatgcccaaggtgaatgccgaattcggcaccacgcccgttatcgagtttccggcgcccgaggccccgaagggtctcaaggccgttgagttggccgagggcgacggcccgatggttcgtcgcggcgacaccgtgaccgtgaactaccacggcgtggtgtggggcaaggacaccccgttcgactccagcttcgaccgccaccagcctgccagcttcggcatcggcgtggggcaggtcatcaagggttgggaccagaccgtgccgggccacaatgtgggttcccgtctcgtggtgtccatcccaccggaatacggatacggttcccgcggcgttccgcaggccggcatcggcggcgaggacacgctggtattcgtcatcgacatcatttccacccgctgacgcctgttcagcatgtgacgaacgccggggtcgcagccggcgtttttgttatagataacgtatcttcattcagcatcaaacggttcaggaggacgatatggctgaggacaaggtctacctgctgacgcaggaagcatataacaagatgaaggaagagctggcccatcgtgagggcgagctgcgtgaggaaatcgctcacaagattgccgtggctcgtgccgagggggatctgtccgagaatggcggttatcaggccgcccgcgaggcgcagagcaagaacgaaggccgtatcaccgagctcaccgtcaagctgcgcgactccaagattatcgaaaacgctcccgagggtaccgtaggcaacggttccgtggtgaccatcgagctcaacggcaacgagatgacctatgtgctcggcagccgtgacatcgtggccggcaccgactacgagatcatgaccccagattccccgatcggcaaggccatcgagggggccaaggtgggcgacaccgtctcctacaccgcgccgaacggccgtgagctgtccgtgaccgtcaaggccgccaagccgctggcctgagtaggcagaagcgcatagagcaagagcctgaaacctcgtattgaggtttcaggctcttgctctatcggctctcgcgcgttgcgattaatgccacagtgccactattaccatatagatcgccaccatgtggcaggcatagccggctacggtgccgcagtggaagatttcatggaatccgaatacgcgcggccagggatccggcttgcgcagcgcgtagacgatggcgccgaggatatagcaggcaccgcccgagcacaacagcaccaccacggcggggcccgcatacggcgaattccagaacatcaccatataggccagaccataaatgccgaagatgatgtacaccaccgtatatagccatcgcggcgcattgatccaaatcacgtggatgatgatggctatgaccgtgcatgcccacatcgaaataatgatgatattgcgccagaatggttccagcgcgaatgaaaccggcgtgtatgtgccggcgatgagcagaaagatattcacatggtcgatgcggcgcagcacatcggtgacgcgggggctccaatcacccagatggtagcaggctgaattggtgaacagcaccaacgatgatgtcatgaatacggcgcatgcccatttcagactggccccgtgtgccaggcagatcagtacgatgcctgcggccaaagacaggggagcggccaccgcatgaatccagccgcgcatagcgggcttcggacggccgtgaacatcgagacgaatcttgcgctccacttccgcaggggcgatgccctcgattttcagtgcccggttctccgccttggccagcgtgcggctggccttctcttcggctttggctcgaatggcttcggccctgaactgcgccttgacgcgcactgcttccgctttggcctgcagcgcctgttcgcatgcctctatgacggcctgacgcttcgtctcgacatacgagtcggacggttcgttgacggccttggaattggtctgctgggtcgctgccatctcgtcgtcggttgctgatgccatatgattcctcgttccccgcgagctgacggtcattccttacgtttccgtaacttacgttagcgtaacctactggattgtcaataccgactcacctgtaatttatcatcagatcacatcacgtaattcggcgataagtggaacctatctgcgtatgatggacacatggctgatttttcacatattctcgcaacacgccccgatttcgacgacgacgaccgcgaatggctgcaccatctcgttgccgactggcaggtcatcgccgatctgagcttcgccgatctgctgttgctcgtgcagaacggcgacggcaagtacgtggttgcggaacagtgccgcccctccaccgtgatgaccctgcgcggtgatgatgtggtgggagacaccatgcccgatgatatgaccggtgagctggacgccgccatgcaatccagcgtggtgttccgttccactgtgctgcgtaccgtaggcaaggccacggtgtgcaatgtatacgctccggtgcggcacaatggcaagacgcttggcttggtggtgcgtgagacgaacatggccacgcgtgaatccaatggtcgctacgaatccgaaagcatcaatgccggaaagcaactgtatgagatgattccgcgcggtcaattcccttacaaggattcggtgatgagccagcgtcatatcgcgcgcgtggcggacggcttcatcatcctcaccgtggacggcgtggtgcggtatgccgctcccaacgccatcagctgtttccgccgtctcggactgctcaataccatgcccggccaatacctgagcgagctgggcacccagctactcaaggagaacgatccggtgccggatactttgccgctggtgctggcaggcaaggcggccgttgactccgagctcaacgccaaccgttccgccgtctccatgagatcgctgccgctgtacgacaataacggccgtgtcggtgcgattatcctatgtcgtgacgttaccgagctgcgccgtcgcgagcaggaactgcagaccaagaacgccacgatttccgagattcaccatcgtgtcaagaacaatcttcaggcggtttccgcgctactcaggttgcaggcgcgcaaaaccaagtccgacgaggtcaagaaggaactgcaggaggctcagcgccgtgtgcagaccatcgccatggtgcacgaggggctgagccagacagccgatgaagtggtggactttgacaaggtgatcgccaacctgctgcgcatggctgtggatctggcaaccatgaaggatcagcacatcgaaatcaattacatgggcaaattcggcatgatgcccgcccaagacgccacgccgttgtctctggtgcttaccgagctcatcaccaattccgtggagcatggattcgaggggcgcaaggagggacatatcacgatctccgtgggacgttccggtccgaacctcaatgtggtggtcgaggacgacggttccggcctcggctctgaagagcagggcggcatggcacgttcctccggttccggcttgggtacgcagatcatcaacaccttcgtgaccaacgacttcggtggttccgtgaactgggagtctcgccgcgaaggcggtacccgtgtggtgcttgatatgaagctgcgtgccgcacaggacgagtaatagccctaacgcaaaaaccctcccaaacgggagggtttttgcataaacaagcaaaaatatcagatctgcatctgcatagcctgcgaacggcgggcgcgcatggcgcggcgcttcagagcgcggcgctcgtcttcgctcagaccgccccagacgccataatcctgattggtgtccaatgcgcacttgaggcatgcatcaatcaccttgcaggtacggcatacggccttggcctcttcaatctgattgtatgcggcaccggtgttgcccaccgggaagaacagttccggatccttgtcacgacatgcggccttggctcgccaatcaaaagcgttgctcattgcttgcctcccttaaaagccctgtggctgatgtgattttccttaagtcctgtacaaggtaaccacgaaccggtgcgtttttcaagaggttttgcccagaaaaagcggagattttatgacgcgcactgcacaaggcatgccgaggcacccgcaatcagaaccgctcggccaggcgtgtccaaatcctcctgactcatcgtgttcaccagcgatgatggtatgcccgctaccaaatctgccgttcgatctccgcaggggaacacaatgcgtgtgctgcaatggtccgggacccgtatgtggcggggtgagcgcaccgcgaataccacgataatggacgaatcggcaagggcttgcctgaaccgtacggcctgcgtatcgcagcagagcggatccagcaggtcgtcggcgtcgtcaaccagccatatcaaacgtggtggtgccggtgcgatgcgcgttgatgcggcactgagccgggaacgatgctcggtcgtcgtgagtcgttggcccctgtatagaccgctgatatgcagcatcaggccgtccatggcacttacctggcgggcaatgacttcgagcagcgtggttttgccccttccctgaggtccgatgatggcgatattgccgcagtcaaggggcacaaccgcatcggtgagtgtgatgccgttatccgataggccaaaccgaatacgatccacctgcccggataccggatggtcttggacactccgtggcaggggagaggtgaacagtggcggtcgcgaacgtgttcccacgaattgggcagcgaacgcgatttgccggcaatatacatcgatattgtcggctggcgcgcatctgaatgccgtcacgtgttcgccgtcattgcagtaggcggcacccggcagtgcgggacttatggtcgcagctctggaatcgcccagcagctcggtggattgcaatccgtctcgcacgcgcagacagatgctaatggccatattcgctttcatatcggtgctgacctgaccaagtggattctgcgtgcaggcgattagatgcatgcccagggagcggccaagcgaggcgatacgcaccaagcgcggcatgtaatccggcagctggtctttcagcgcatggaattcgtcgatgaccacgacaagtcgaggcggtgcgtcgcgcatgtcatcaatatcggatacatgcaggtcggcagacagcttttcacggcgggtcagttcggcttccaaggccttgagcgcccgtgcggcatgggccagatcgagatcgcagacgcttccgatggtgtggggcagttgctcgagtttgcggaaagcggcaccgcctttgaaatcaaggaaaacgaaattaagctgatccggaccattcatggccgccaaagctaagcaccagctttgcagcagtaccgatttgccggagccggtggtgccggccaccagagcatgagggccctgcctgtgcaggttgagcatgaacgggccggacgcggtgacgccaagcggcacatcgtaatcggaaggctcaagccagttgcggactatggttcgccagccaaggcggtcgaacgtcagcagggattcgatggagggcgcatcggaagcgcagaacatgtcggcagcgtcaggggaggggcctcggggagcgtggtgtgtctcagtggactcgacagggctttgggacggttcgacatatggcagcggcaatgtgacgagcatcgatgcaaggccaccgacgatgccgggaaccatgactagggcaaacatccattgcccgtgcaacgccatcattgccagcatcatgatctgcgccactatcggggcggccgcaacgagcaccatcacgcgggagcgtgcgccgcgcggagcggttgtggcaccctttcttgcaggggccggtaatgaacgatgaaatcgtattgtgcgttgcctttcacgagtcatgctttcagcgtgaatgaaggatgcgcgtagcgcaagcgataacgggatatgtggttccagcttgccgggcgtgcgtcgcggcaagctgattggctgaattatcagctttcggcgagtgtacctacggttcctgcggcgtgggtgcccgcagcgagctggctgaacagttcggtgttcttggcatcgtcaagcagcacggaggagccgacgccatccacgtaataatcgggattggaccagtacacgctgccggatatgcccttgcttcctgtggcgtctttgaacgccaacgccatattcaccaaggttagcggcgtggttttcccatcgacggtaagcgcactcaagccggcttcagccatggtcgtcaccgtcttgggattggtcaacgtctccttgctggaggccttcttgacaatggcggaaatgacctgacgctggcgggcattgcggccaaaatcgccggtggcatcggcataacgcatacgagagaacgacaatgcagtcgaaccgtccgcgttatggcatccagctgtccagttcaggccggaataagcatcctgtacgtcctggtcgtaacacaattccacgccgcccaaagcgtctacgaccttctgcaagcctccgaacttgacctgtgccacatgatcgattttctgtccggtcaactgctctatctcgccgaccaaggcctttttgccgaccagctgagccacggcattgatcttcatgtattggtcgttcacgttcatcaaggagtcgcgcggaatggaaatcagtgaactggggccggatttaggcttggtcagcaccagaatcgtgtcggttcggtatccgctgatatcgtctacgccaccaaagttagtggaaccgtcacgctcatcggaaccgagaataagccaggtggaagtcggcgtgtcggctgcggtggtcagccaatccgctttgttgagcttgccgtccacccagccccaggcgccgaacacggcgagcaccagtgctgcgataagcaatatgactgcgccgatgacgccattgcggactttatgaccacggccgcgtatcgctatggcactgttgtgcccggacgtcatagctaccacgggcgttctggagggggtggcggagcgaatgacggatgatgccggcgtgctggcattgcgagatgagccggacgagcggcgtgcctgcgtcggtggaatgctttgcggctgggaggaggccgaggtgcttctgcgagcggatcggttcgcattgggggagaagctgggcggtatgccgttatcgttgccgccggcggctctgggtgttcgcgacgatgatgagggagtgatggtacgtggtgtctgtgacgatgctcgtgaacgtcggcctgccgaaggaataaaactcggcggattgatctgcggatctgccccacctgattcctgcgtcatgcaatcctcccaaaactgctcaatttactgaatgacacttttgcacatgctgtgccgtgccatacctagggagcgctgttcctgtgcaggaacggcacaatattcatctcaattggttatgaagtgcagtgctcggtggacggcgtatagcacattgaggcggaaaaaactgtaatgacacgagacttgatttgacaaattccaagtcacatgtgtgtaatttgtgggtacaagtacaactcataggcaaggagggtcgcatgtggggtgcgattgacgattctgccgaagagcctttgaatgagttgtggggactgttcaagcccgatggtgatgtgtcttggcagcacaaagcattgtgcgcacagaccgatcccgaagcgttctttccggaaaaaggtggttcgacacgcgacgccaagcgcgtatgcgccaaatgcgaagtccgcgagcaatgcctgaaatgggctattgaccatgacgagcgttttggtatctggggcggtatgagcgagcgtgaacgccgccggtacaagaaggaccacagggaacaggcatagctatatgcacggccacttcaaggtcagtgcgtacactgggagtttatgaatccgacagcgaatagcgatatccatgaagctgtggtcgatgccatatcggcaaggccatacacgcaccggcaggatgtggatgccggcatagtggcggtagtcaccgttgaagcggatatgcgttttctcaatgccacgcttcgctcgctgctcacgcaaagcgtattgccgggcgttatcgtcatagccgatgccactgggctcacaacgcgatcggtgcaaacttcatttgaggtgatccactcacctgcaggtcccgcaatggaggtgccgcaggcaaagcaggtgagcgtgcaagtggtgcgtgccaagggggcgcgttcatttggtgatgccgtatccaaggcgctcgccgccgccgatcttgattcttccacgcgcgcggtgtggatgctgcatgatgattcccgtccttcggataactggtgcctggagcgattgctcgaggcgtggcgcaatgcttccggagccggcatcctaggatgcaaacagtgcgattggggaggcacccaattgcatgatgttggtatgtacgccggcaatcatgccgtgcactccctcgtggtcgacggtgagcccgatcaagagcaatatgatggtcggcaggatgttttcgcggtttcccttgcgggagcattggttccgttatcgcaactcagacgactgaagggcattaatcattggttcactacctacagtgaatcggttgacttctgccgccgtgtctgcttaagcggcaggcgcgtggttattgtgccgcaggcggaaatcgcgcatcgtcgcgcacgctatgagggcatccgtacccgtggcggcgaaccgttgaatgaggagagtgccatcaatccggccatgacggtggctcgttcgcagcagcggtatctgtacaccgacattgcacgctcggcatggatagtggtatggctgtggcgtttattgcgtagtttcggcatggccatcgcgatgttgttccgcaaaaagccatatgaggcatgggtgcagctgtgtctgccgtggttggcgttgacctccatcgccggtgccatgcgatcgcgcagtctggtgactcggcaatccaaagtgtccatgtcctcattgcaggtgctgactgccgatcgccagcaaatcaagcaattccatgaccgtcgtgacgcgttcatggcccagaaggggctggtattgctgagccctctggaacgtgcccatctcaggattcgtctgatgcgccgctgggcgggggccttgggattggccgtggtgtgctttgtagcggtgatgctgctgtattggccggtgttccgttcgctgttctctgacggatcgttgtattccaatgcgttgttgcccacgggcgcaagtttcgagcaattggtgcagtccgccactacgccgtgggtgtttggatccggcgttggccttcccgcaccccccacgccgtggctgttggtattgatggtcgcgtccatcgtcactgctggtcatgttcctgccgccttgggactgatcttgtttgccgctgcgccgttgagcgccttgtcattctgggcactggcgggcatctttacgcgttcggatgtcgtccgtgtgctgggcggattgctatggtcctcaaccggcatgatgtttggctggtatgcacaggcgaatcttcccatgctcaccgttctggtgtttttgcctgccgcttttgcattcgtgttccgtgcagtgggcatgtaccacaccgaggatccgttgaagcctcacccgtccgtacaagccgcggccatctccgcgttgtgctttgttcccgtggtggccgctgagccgcaactgctgctggcgttgattgtggtattccttattttcctgctgttcgtgcagcgcaagcgcgccgcattattgctgattcccatgcctgcagcttttgccgtggcccccaccattctcaactccatccgatacgcagacgaaggattttggcgtcagctgttcggcgatatcatgttgccttcctcggcgcagaacggatcgccggcctcattgagcctgcttgaatcggctcaacgggcgttgggctggaatcctttgtccggacaggccgtcgatattgcaatggctgtggtcttcatagcgattaccatcctggcggttacctcgttggtattgccttttgcactgagaacatcacgactgatgtgggtggtcatcgtctgcggcggtgtgctggccatgtcttcaagccgtattgccatctcagtcgatgctgatggcgtggtggcgggttccgcccagcccggcatgctgatgatgatcatgggtttcctggcctgtgtctgtctggtggccggcggtgccgtcaagcggttccgtccgctgcattcttcgtccggcgagcagaccacggagaatcgtcttcacccgttgattgtcttcggtcgtgccgttcttgcggtgttgctggccgtctgcatcggtattcaatgttggtatggactggtgcgccatcaagatgagggacttaatgtttccggttccggcctgcccatggtggtcactgattacctggagtccggagcggaccatcgtgtgctggcggtcagcgctcagacacgcaatacggtcaattacacggtgatgcgcacttctcgaggcgaattgatcgacagttcaccggtgcaacgggtgcgtctgctcgatggcaagcatgatgacgtcgatcaggtattggccaaagcatgcgcgaccttgctgtccaatccggatgagcaggcgattgccgatatcagcgctcttggttttggtggcatctatgtggtcgccgatacgcaatccgatgccgatacagtgccttacgaacagttgagcaccaatatcgccgcttcggacggcacgcagtcgctggtctccaccgatgccggcagctattaccgactcacgctgcagaacgccgatgcccagaacgttgacacctcttggcagcagcgtacacagcagagcgcttggcgatatgcatggctgatttgcctatcggtgattctggtgctgtattgccttgtcgcagtgccgcgcagacggttgcttgccggattggaggtggaagcatgagcaaggagacaacttccaagtctaggcgtgtgaccagcgtggtgatcggtgtgatcaccatgattgtgctgattgcgttgctggccgttttggtggtgcttcctggatccaagcagtgggtggatacggtggtggccaccgacgacgccatcgaccggaccgtcagtcccacgcagactgaggcctattgtcctgcccctatggggttggccgatactggcagctacggggatagcgccttccaagcgacaaccggtaacctcagcacacaagcgcgttatgccgcttttgactccgtatacagcgccacggtatccgcgttcggtgatgattccgctgacagcatcaccttgaaggatgccgatccgaccgataacgacgccgtcaaaacaggtgcccagtcaatcgacaacgggtctcgccttctcgatacacgcatgctgcaggctgctgaaggcacaggcactgtcggctccattgcctcctgggcggatgacggtgacctcaaaggtgtatccgcatcatcatgtgagaccacggccttaagccaatcattcctgctgtccggtacggcgaccggcaccacgcagcagctgattatcgccaatccctctaccaagcccactaccgtggagataaagatttggggatcgaagcagtcaggcgagatggcattgtccacgcaatcctcattggccattcccgccagcggcgagaatgcgctggacttggcagctgccgcaccgaatcagcaggggctgtacgtcaccgtatccagcaaggagactccgattgcggctgttgtccgcacggtgtccatgaatggactgacgtcaaaaggctcggatttcgcgctgccgcttcatgatgcgtccaatgcctcagtggccacgtcgatcgcgaagggcgatgcggtggatgcctacctgtatgccgcttccgcgacgggtgtcacgttgtcgtggatcaccgagcatggtctggtacaggcaaaggatgcaacattgcaggccaatcgggtgaccgtcgtcgatttgggtgaggctcccgaagatgcattgggcgtgatgtccactgccgaagacgatgtggctttcagtgtgaaggcgtcccagtccggtgatgacgatcaggctgatttcgccctgattaatgccgcggctccggcttcgtttactggtcttgccattcctgatgatgtggatgccacggtatcgttggcgaactcgtccaatcagtcgcgtaaggccacgttgcacgcctatgacgccgacggcaaggctaccgcctccaaggaagtggagattgacgccaatgccgccacgacgatagatatcaaggatctgtcgaaagacaatgaatcggcggtactgctgatgctcgaggaccagtctcagcagattggctggggtgtgcgattgacccacgccgaccttggcgatggcaaagtcgccggtctggcatcgctgggtgccacgccgctgatgcctgccaccacccatgtctgggcgcgcagcaatccctcgatcgtccactagacgagtggaccccgggtttatttacagtccaaagtcagggtcgatttcctcgggtctgcggccgtagagttccgccattcgggaaaccagctcgtcacgaatcgccaattgcagttcgattttggttggtgcttgcgtctgtaacggcatgcggtacagcacgatgcgtgccggaatgccatgccctgcggggaagcattgcgaggtcatattcggctcgacctgccacggcaccggatccgacggcggcacatcctccacagcgaattgcagcgggcgcaccagttcgggccaggcatcgccgaggcgacgcacctgagcggccaccatatcgtcgaacatgccggtacgtgtgcggtagcggggcagtcgggtgccgaacatcggggtgcgcgtacccctgccgtgacgattgcggtacacgcgagcattccaaggtggctgaagcatggttccaccataggccaaggcgacggcaacatgcgctaggattggttcatcgaatcgaatctcatcagcaaggaggacacggcgaatggtggtacgttcgtgggccgaacttgatttggatgacatatgcgcgcatgcacgagtgttcggctttgatctggacaacacgctggccagttccaaacaacctatggaacccgcgatgatcgcacgattcagcgcgttgaccgcgcatgcgaccgtggctttgatttccggaggcggcatggatgtcgtcacctcacaggtgctggatgtattggggccggatgccgatcgcagccacctgcatgtcatgcctacgtcaggctcccgctactatcgatgggatggggagcgctggacgctggtctacgcacatgatttggatgaccgcaccgttgccgccatcacctccagtctggaacggcgcgccaaggaactaggcatgtgggaagaacatgtctggggaagccggattgaaaatcgcggcagccagattaccttctcggcgcttggtcagtatgcgcccattgccgccaagcagtcatgggatccggacaatatcaagaaacaagcgcttgttgaagcggtgaaagcggatttgccagctttgagggtgcgctccggcggatattccagcgtggatgtgagtcaacatggcatcgacaaggcctatgcggtgcgtcgtcttgctgagatacttgatgtgccggtcggcggcatcgtgtttataggggaccgtatgactcctgacggcaacgattatccggccgtcgcagccggtgccgtgggaatgaaggtcgagaacccccaggatgcgttgggcctgatggatgcattgctgcaacgtgtgggagcatcggcctaaacggtcgggaggcctgcctgggcgaaaggggatgcgtgttgagctgggatcgccgtgattcgttgctgggcatgatgcgtgacgcgttgtttcctcgtggctgtgccgggtgtgacagaccggatgaggtactgtgcggcgactgtcgttccctattcgccaactggcgcaaccgggaactggtatcaggtcaagaaactcagggtgctgtgcacacatggtccgcgtcaacatatcagggagtcgtcaggcatgcgattcttgcatggaaagaccatgatgataccgagcttgatacgatattcggcgaggtaatggcctcattactggaacacagcgccattcaccgctcctgccgtcggcagaccgccgtgctcgtggttccggtaccttcatcgccggcttcgatgaggcgcagagggagacggcatatcgatccattatccaaggccgtggcaaacgcattatgcgattacggcttcgatgcgaaaccatatcgggtattggccagtattgcatcgggcggccgatcggtgcagcaggcgtcatcggctcaacgcgcccaacgcatcggtggacgaatcgcacttggctctgatgccgtgatgcaaggccaacaggtggtactggtcgatgacatcatcaccaccggctcaacgttgcgccaatgcgcgcaaacctgcagacaggccggcgccgaggtcataggggcaatgacgcttaccgaagccaaaagggtggtataacaacaaagaatcctcgccggatcgacgcggattcatttgcggtcgtgcggccctagatcactcattggcaatgtgatatttgggcagggtgatctcgaaatcggcgccacgggtgtcgtccacgacccttatgctgccaccgtgcaattgggcggcccatcgtgcgatggacaggcccaggccggtgcccccggattcagtacccggtcccgtcttgcctttgacgaagcggcggaaaatatcggaacgatcggaaggtgcaatctgtgagccgaaattgaccacattggtcacaatggtgccgttgtctttgtcttcatgcgtttcgaccagcaccgtggtgttatcgggggagtgcttgagcgcgttggcgatgatgttggtgaacagctgacggagacgatcctggtcgccttccatcgtgatatcatcgctcacgcgcatctgaatatcatgagcatgcccgccatcggcgatttccaacggttcaacggtttcgtccaggaattcggcgacgttgaactgctcgatgttcagactggcggctccagcttccatacggctcagatccagcagaaaggcaataagatcgctcaggcgctgcgtctgggtaagaatgccctcaagattggctggcgtgggttcagtgaccccatcagccatgttctcgaccatcgcctgcaatgcagacaccggtgtgcgcagttcgtggctaacgttggcaatcatgtccagacgcattttgtcggcatgctctagctcttcggccatttcgttgaaggagcgtgcaagctggcccacttcatcatgacgttcctgatcgatgttcacacgcacggtgtaatcgccctcggccatggcttcagccacgtcacgcatctggcgcagaggtgcggtgatacctcgagaaaagaaataggtaatgcccagcgccactaccagagtcagtggcatggcaatccaaccggaccatccgaacttcaggagaaaccagcacatcgcgaaggcgatggcggtggcgcaaacgataagcgcactgagctccagcttgagcgaagagaacaaatcaaccggcttgacacgcttggtagcgttgtcaagccgggatttcgttgattgcggagatgccattactcggtcggcggttcgaaggcgtagcccacaccatgcacggtgcgaatcatatcggcaccaagcttatggcgcagggccttgacgtggctatcgacggtgcgggtgccagaggcatccacccagtcccacacctcttcaagcagcttctcacgagtgagcaccgacttcggacgacgtgccagcgtggccagcaaatcgaattcggtcggggtcaggtgcacctgctcaccgttgacggtgacgatgcgctgggccggatcgatgaccatggaaccgaaatcaagaatcttctcgttctcggaattcttggcgatgaccttggcgcgttccacacggcgcagcagcgccttgcagcgggcgatgagctcacgcatggagaacggcttggtcatgtaatcgtcagcaccggcacccaggccaatgaccttgtcggtttcatcgtcacgggcggtgaggatcagcacaggaaccgggcgctcggcaacgatacgcttagtggcttcaagaccatccataaccggcagcatgatatccatgatgaccagatcgggcttgagctgcaaggcggcctgaacggcggaagcgccatctccagccacacgggcggtccatccttcagcagtgatgcgctgggcgatggcagtggcgagcgtcggctcgtcctccactaccaacaccgtgcgcggagccgtgttctgacgcgctgtggaattcagcatgaatagttacctttcagcctgttggctaattcagttctctggcttcaagaatacaactgcgagagccggaacggtgattttagccgagaaaggccttgaatggtattctccggcgtccgcctcgaacgtgccgttatggatgtcggaaccgccatacttggcatcatcggtggtgaacacttcggtccatttgccgccggtgggcagtgccacctggtagtcggaccatgcctcgccggagaagttgaccaccacggccagcgtctcgcccttggttccgatgcgcaggaagctcagcgtgttgtgatcggcatcgtcgctggtgagccactggaaaccggccggatcgaagtcctggctccacagtgccggattcgccttgtagaaggcgttgaggtcggccaccatggtctgcacctggcgatgatcctgccagttcaggcaatcccagtcgatggaggcatcgtgatcccactcgccccactgtgccagctcgttgcccataaaggagagcttcttgcccgggtgagcccactggtaggcgaacagttcacgcacgccggccatcttctgccaaccgttgcccggcatcttgccatatacggatcccttgccgtacacgacctcgtcgtggctgatgggcagcacatagttctcggagtaggcatacaccatcgagaaggtgatttcattgtgatgccacttgcggttgatgggctcctcatgcagatattcaagggtgtcatgcatccagcccatgttccacttgaggccgaagccgatgccgccggcggaagtgggggcggtgatgcccggccatgcggtggattcctcggcgatcatcatcacgccggggttgttcttgtaagcggtggcggtggcctccttgaggaagtcgatggcctccaggttctcgcggcctccgtagatgttcgggcgccactgaccgggttcgcggctatagtcgaggtagagcatggagctgacggcatccacgcgcagtgcgtcgacgtgcaggtcctcaagccagaacagggcgttggccaccaggaagttgcgcacctcgcggcgtccgaagttgaacacataggtgccccaatcggggtgttcgccgcgcagcgggtctggatcctcgtacagcggggtgccatcgaaacggccgagcgcaaaggcatccttcgggaagtgagcgggcacccagtccatgatcacgccgatgccggcctgatggaacttgtcgaccaggtaacggaaatcgtcgggggagccgaggcgtgaatccaccgcgtagtaaccggtgacctgatagccccaggatccggagaacgggtgctgggccaacggcatgaactcgacgtgggtgtagccctcctgcttgacgtagtccaccaattccgtggctaggtcgcggtagctcaggcccttcttccaactgccggcatgcacctcgtagatggagaccgggccgttgtgcgggttggtggtgcggcggtgctgcatccaggcgtcatcggcccactcgtaggaggattcggtgatgatggatgcggtgttcggcgggatttcgtgctgacgctccatcgggtcggccttcatctcccacacgtagtttgcattgaggatttggaacttgtagttctcgcctgcgccaagaccgggaatgaagatttcccacacgccggaggaaccgagctcgcgcatggcgtggcggcggccgtcccaggcgttgaagttgccgaccacgcgcacggcgtgggcgtttggcgcccatacggagaaggcggtgcccaccacttgttcgccgggcgtgccatcggcaccgcccattgggtcgtcatagcgcagcacgtgtgcgccgagggcttcccagagcttttcgtggcgaccttcgccgaacaggtaggtgtccatttcgccgagtgtgggcatgtagcggtaggggtcatcctcgatgagcacgtcgccgctttcccattcggttttcacgcggtaatcgggaatggtgggctgcttcttggtccccgcggcgggaacggtggtcacgaatacgccgttgtattcgtgtgtcatcggatattcgccgtcttgggtgagaatggtcacggatttggcaagcggacgcagcacacggattgtggcggtatcggcatgcttgccaatgccgagatgcccgccaagaactccgtgggggttgtagaattcagcattgctcaccgcgtcgaggtcactttgggcaacaggcacggtgacggtatcttccttgatcttcgtttcattagccatgccccaaagtctacgtgcgttggtgtcggaaacgctacattggcgcgtcgaaaatggcgaatttatgccgcttagagtgttgtcgcctggttgtgagcgctctcattgtcccagtccagaccatatggcacaattattcgagtttttgtgagtaatccgtcagttctcggaggatacatgtcttatcaagtcggcgatatggtcgtctacccacgtcatggtgcagcaaaagtggaggccatcaccgagcggacggttaagggcgtgacgcgcgaatatctgcagttgtccgtactttcctccgacggtctggtcatcaatgtgccggtggaaaacgccaagaaagtcggtgtgcgtgacatcgtctccggttccgaggtagccaaggtgttcgagattctgcgaaccccgatcatcgaaaaggaaatgaactggtcccgccgttacaagctgaatgtcgaaaagatcgccaccggtgatgtcaataaaatcgccgaagtggtgcgcgatctcgcgcagcgcgacgtggacgaacacggcttgtccgcaggcgagaagcgcatgttgaccaaggcccgcgccatcctgacctccgagatcgcgctgtccgagaagatcgatgagacggaagcacagcgtctgcttgacgtgaacctcggctacgcacctgcccaggtgggtgatgaccagcatcacgctgctgagcctgaagaagcggccgcagacacgctggcgcgcgtcgaagccgaaaagaagtccaagaagaagtgatcctgcgcgtcggccagggctttgatgcccatcggtttgccgcttccggttccggacgtgaattatggttggccggactgtattggccggtcccagagaacgctgcgccggctgaggctgcccgatatgagggcatcgaaggtgattccgatggtgatgtggccgctcacgccttgattgatgcgttgctcgccgctgccggtctgggcgatattggttcactgttcggcgtgggctcccatgcgcatggtgccggtatgcacggctcggatatgcttcgtgaaactgttgcccatcttgcggatagcggctatcggcccgtctccgcgtccgtggccatcgtcggcaatcgcccgaaaatcggtacccgccgcgccgaggcggaagccgcgttatccgcggccgtcggttgcccggtatcagtcaccgccaccaccaccgaccatatgggttttaccggtcgaggcgaaggcatagccgccatcgccagtgctttggtggagcgtcgctgatgacgaagccataagagaggagcccctttcccatgcggaaaggggctcctctcgttgagagtagtgcggagtgctacttccgcaacgtttccacagctttggcaagtgcccagaacagggtggacagcgtcacgataatgaagcttgggggagcggggaacatcgcggaaagcaccagtccggcccagatggacaccaggcacagcacgctggcaatcaccatggccttgaacggcgagccggccagaatattggcggtggccgcaggcgtgattaccagagcgaaaatcagcagtgtgcccacagccggcacggcaatggtaatcacaccggccataatcgccatgaatgccacattcatcaggccaatcggcacgcctttggcttgcgccacctgctcatcgagcgaactgaacagcagcggacggtagataatcgccaagaggactagcagcagcacgtcgaacacggcgaagccgatgatctggccggtggtgatggtcaggattgagccgaacagaatggactgcatctgctgggaagccgagctggacagtcgtgcgaagaacagacccagaccggtggcaaaggccagtacggttccggtggcgatttcacgttcggagacgcgcttgcccaatgcgccgatgaccagtgcgccaccgagcgcgaacacgcccatgcccagcgagacgggcaggccgaacagcaccgcgccggtggcgccgggcagtccgatatgagccaatgcatgagcggcgaaggtggatcgtcgtgcgatggtgaagtagcccataacgcctgcggccaatgcgatgcacaggccggcgatgaaggcattggtcatgaacggggcagatagcgtgctgagccattcgggatcatatgagaagttgatggtgctcatggtctttgatatctctgtgtctcttgtttcttcatgccgcggcttggtatgcgcggcgattctgtacggtgctgactgctgtgctagacgttattggtgcgcggtcgcggtatcggtgccgtgttcgtgatggtgcagctgcgccacttcggcggcggtatgcatatcctgcggctggtcgcgtggctcgtccggagtgggggtcacgaacatgtctccctgcggggtggtgaccacctgcacctgtgtgccatacaaatgtgtcagcagatcggaatcaagcaccttgtgcatatcggcgtaatgcggatggccgtccagcagatatacggcgccggtcagaatcggcaacagcatgttgagatcatgcgccaccacttggatagtcatgccaagttcgcgattgagtttggcaagcacatgtacggtggatcgttggctggccagatccagattggccaacggctcatcaagcatgagcagctgtgggtcgcataccagcgcctgggcgatggcgacacgctgacgcaggccgccggacagctcggacagacggtaatgggccttgtctgcgatgccggtgaattccatggcttcgtgtgccttggccttctgtgctttggtgacgggatgaatgccgaatcgtgtaccggtcagtcccagtagcaccgactgctcggcggtgagattggaatcgacgtcggaaacatagctttgcggcacatagccgatgcgtttgttcatctctccggccggcttgcccaatacggtcagggagccgtgcgagagaggcagcaggcccaactcggccttcatcatcgtggtttttccggtgccgttagtgccaacgatggcggtgaccgaaccggtggggatggtgaagttgccatgttgccatatcgtgcgatcgccacgcttgatggcggcatccgtgaacacgatgcatgcggaagattcgttcatagggctcgattgtggcaaatgatgctgacaatcgttctcaatatcgaatgatgcggttatacggttatggcaaaggccatgcaaccgatgtcatatcggaagcatggccttcgcgcatatgcatactatggtcacagctcgccgccgtggaccccgatcatttgcccggatcggtttggccctcgttcgaaggagtggtgccctctgtatcggtggtggagttgtcggtcccgaagtttgctgaatcactggcggagtcggcgtttgtggccttgcattcgcggatataagtggcacctgcatcgttggcggagtcggactggtttgcggcagtgtcggaggaattttctccggactcatcgccttcggtattgtcgccggtgccggcatcacagccgtaagtcggatccaccgcgtcaatgatggtgttgatgagctggttgatccaagcattcagcgtggtggcgtccgcgggcatttgctcggagacatcgacgaccggcacatcggatttgcctgcggtgccggtgatcatattggtggcatcgctggcttcctgcgtgttgttgatcaatacatccgcgcccttgtcttcaataagcgtctggaaagcctgcagatccgccggtgctggttcgccgccggaagccgtcgactgcgtatagcccttgggggttgcgtccttgaaccccacgtcggccatgagatagtaggccacgggttcggttgccgcgtacgtgagattggtatgggttttggtgaagtcgttgacccaggtttccagtgttttttcgctgttcagccaattcttcagtcgcttctggaatattttcttcttgctgggcagagccttgacatatgcctcggtgatggcggaggccatgctcgagcgtgcgtccttggagaaccataggtgagggttgtcgccttccatggcgcccataacggaagcggcggaaaccaaggtggaacttttcgacaacggcttggtcgcccaggaatcatagccggcgccgttggccaccacgatctgtgcttgggatagtttggcgacgtccgaggttttcggctcgaaatcatgggcatccacattggtggagttcatgatggaggtgaccgtcacgtcatctccaccaagttccgcggccagcgacccccattggttgatggaggcgaccacgttgatcggaccggtgggctcgggtacgttctgcttggtgttcggctcggtttgggttgtggccgagccgcaagccgcggaagcgaacagcatgacggcgcctaggccggctgcggcgagtttcgtgagtcgtgtaatccgaatccccatggcgtgccttcttcgttgagatggacgaacgatataatcctgatttgttccaacgatagcctatcgtttcgatagaatgcgccgaacaatatggaagggtatggatgtccacgaaaatcgacggcaagcaggttgctgccacgatcaaagccgatctcgccgaacgtgtgaacaagctcaaggcgcaaggcgtggtgcctggactgggcacgctgctggtgggggaggatcccggctcgatgaagtacgtggccggcaagcatgccgattgccaggaggtgggtatcacctcggtcaagaaggaactgcctgccgatgccagtttcggccagattgccgaggccgtgcgtgaacttaacgatgacccggcttgcaccggatttatcgtgcagctgccgctgcccaagggcgttgatgaaaacgcgatcatcaacatgatcgatccggccaaggatgcggacggcatgcacccgtacaaccttggcgaactggtgctgcatgtacgcgcagacatcgcaacaccgttgccctgcaccccacgcggcgtgcttgaattgcttgatgcctacaacattgacctggaaggcaaggaagtgtgcgtgttgggccgtggcattaccatcggccgcaccatcggcctgctgctcacgcgcaatgccgtcaatgccaccgtcaccttgtgccacaccggtacgcgcgacgtggccgaccatatgcgccgtgccgatgtcatcatcgccgcaatgggctccgccggcttcgtgacccctgacaagatcaaggaggggacggtactggtggatgtgggcgtcagccgcgtattcgatgaggaggccggtcgctaccgtatcaagggcgacgtggacaaggcctgctatgacaaggcgtccgcatacacccccaaccccggtggcgtaggccccatgacccgagccatgcttctggccaacgtggtagaaatggccgagcgttcctcccgatgaggaacaggtgggccgggatgttctgttgccgggcgtaaagcttggcctgagcggcctggagcggtcccggcaacagaacatcctagcccatctgtggtcaacgcaaattaaagcgtgcgacacacccgaatttttctaggaaatttgggcagagttgcttgtatcgtaaatatttgtatgtctgcaagggcatacgtataactgaatatcgagaaattatccatccactattagaaaccatatatttacatggcagagaacaacattgaagtcaccaaggttgccatcaacgacatcggcaccgaagaggacttcatcaaggcagtcgattccaccatcaagaacttcgatgatggtgatctggttgagggtaccgtcgtcaagatcgatcacgacgaggtcctcctggacatcggctacaagaccgagggcgtcatcccctcccgcgagctttccatcaagaaggacgttgatcctgacgaagtcgtcgaggtcggcgacaccatcgaggcccttgtcgtcaccaaggaagacaaggaaggccgtctgattctgtccaagaagcgtgctcagtacgagcgtgcttggggcgacattgagaagatcaaggaagctgacggcgtcgttgagggcaccgtcattgaagccgtcaagggcggcctcatcgtcgacatcggtctgcgtggcttcctgcctgcctccctcgttgagatgcgtcgtgtccgcgacctctccccgtacatcggtcagaagatcaaggccaagatccttgagctcgacaagaaccgtaacaacgtggttctgtcccgccgccagtaccttgaggagacccagtccgaggtccgcgagaccttcctgtctcagctcaagaagggccagatccgtgaaggcgtggtgtcctccatcgtcaacttcggcgctttcgtcgatctcggcggtgttgacggtctgatccacgtttccgagctgtcctggaagcacatcgaccacccgtctgaggtcgtcaaggtcggcgacaaggtcaccgtcgaggtgctcgacgtcgatctcgaccgtgagcgtatctccctgtccctcaaggcgacccaggaggatccgtggcagcgtttcgctcgcacccacgttcccggccagattgtcaagggcaaggtcaccaagatcgtccagttcggtgtcttcatctccgtcgaagacggcatcgagggcctggtgcacatctccgagctcgccaaccgtcacgtcgagaacccggagaccgtggtcaagccgggcgagaccgtgttcgtcaaggtgatcgacgtcgatctcgatcgtcgccgcatctccctgtccctcaagcaggccaacgactccgttgacccggcttccgaggacttcgatccggccatctacggtatgccggccgagtacgacgagcagggcaactacaagtaccccgaaggcttcgacccgaacaccaacgagtggatcgctggttacgagaagcagcgcgaggagtgggaagcccagtacgccgccgctcacgacctgtgggaagagcacaaggagttcgtggccaaggaactggcaaatgcggccgagtccgctgccgccgacggccagaaccagaaggaagagaagccggtcgaggagacctccaactactcttccgctgctccgtctaccggcaccctcgccgactccgatcagctcgccgccctgcgcgaccagctgctcggcaagtgagtttgccgcgaagctaacgcttagcgtctgaagaaacccggtccaagtgggccgggtttcttgcgtttcgggagttatccgccaatgattccccttcctgaggggagctgtcggcgatagtcgacttgaggggagttgcagctacgataggcaccatgatgcgaataggactgactggcggtatcgcagccggcaaaagcacagtggccgcacggttgcgtgagctgggcgcgttgcatatcgactacgatgccctggcccgccagatcgtcgaacctgggggagtggcgctgccgcagattgtcgccgaattcggttctgatgtccttaacgctgacggcaccatgaatcgccaatggattgccgaccatatctttggcaaggatgccagaacgggcgcgcgtgaacgccttgatgccatcgagcatccgctgatttacgccgaggcggcgcgtctggaacgtaagcatcccgagacaatcgtcatcgtccatgacattccgctgctcgccgaagtaatcgataccattcctttcactttcgaccatatcgtcaccgtcgaggcaccggtgtgcatacggcttgaccgtatgatcgaggaacgcggtatgagtctcgaacaggctgaagcgcgcatccgccaccagtccagcgaggaggaacgtcgggctatcgctgacatcgtcatcgactccacccgtccaatacctgagatgctggcccaagtggatgaaatatacgtgggatggctcacacaaaatgaacggcactagagaaagtgtgagacaaacgcacaatatcgctcaatcgcacattgaaaggaatggcgggaatgagctgtttctcggggaattgtgttcgattgtcaaagcgaaatcctcacacttctcttattgagaataatttgctgtgaaccgggaccgctaagataaagcctcatgggattcaatatcgagcgtgcggacaagcctttcgtcgtcaaatcgccctatcaaccatctggcgaccagccacaggctatcaccgagctgtctgaacgcatcgaaaatggtgaaaatgacgtggttctgatgggtgccaccggtactggtaaaaccgccaccaccgcctggctgatagagaaactgcagcgcccgaccctcatcattgagcccaacaagacgctggccgcgcagctgtgcgccgaattccgcgaacttatgccggataacgccgtcagctacttcgtgagctactacgactactaccagccggaagcctatatcccgcagacggatacctatatagagaaagactccaatatcaatgacgatgtggaacggcttcgtcatcaggccaccgcaaacctgctgacccggcgtgattgcgtggtggtggccacggtatcctgcatctacggcttgggcacgccggaagaatatgccggccgtatgctcttcctcaaggtgggtcaagagatcaaccgtgatgacctgctgcgtcaatttgtcgccatgcaatacaagcgcaacgacatcgccttcacccgcggtacgttccgcgtgcggggcgacaccgtcgaaatcatccccgtctacgaggaactggcggtgcgtatcgaattctttggtgacgagatcgaccgcatttccacgctccatccgttgaccggagacgaaatcgatgaggaaaacgaggttcacattttcccggcctcgcattatgtggccggtcccgaacgcatggaacgggccctgaaaaccattcgcgaggaacttgacgagcgtctggccgagctgcgcaagcagggcaaggagctggaagcccagcgcctcaacatgcgtaccacctatgatttggaaatgctcacccaggtgggtgtctgttccggcgtcgagaactattcgcgtcatttcgacggtcgtgccgccggtactccgccgcacacattgcttgactttttccctgatgacttcctgctggtcattgacgaatcgcatgtcaccgtgccgcagatcggcgccatgtatgagggtgacgcctcccgtaagcgcacgctggtcgagcacggcttcagactgccctccgcaatggataatcgtccgttgaaatggccggaattcctgcagcgcgtgggccagaccgtatacctctccgccacgccaggtgactatgagctgggactttcggatggcgtggtcgagcagatcatccgtccgaccggcctgctggatccgaaaatcgatgtgcgaccggtcaagggtcagattgacgacttgcttggggagatcaaggcgcgcgtagacaggaacgagcgtgcgctggtcaccacattgaccaagaagatggccgaggatctgactgactatctgctggaacgcggcatcaaggtcgaatacctgcattccgacgtggacacgctgcgtcgtgtcgagctgctgcgcatgctgcgtgagggcaaaatcgacgtgatagtcggcatcaacctgctgcgtgagggccttgacttgccggaagtctccttggtggcgattctcgatgccgataaggaaggtttcctacgctcctatcgttcactgattcagaccatcggtcgtgccgcacgaaacgtgtcaggcacggtaatcatgtatgccgatgagaccactgatgccatgcgcaaggcgattgacgagactgatcgccgtcgcgccaagcaaattgcttacaacaaggaacatggcattgatccgaagcctctgattaagaaaatcagcgatgtcaacgacatgctggccaaggaggatgtggatacccagaccttgctcgagggcggttatcgcaatgcgggcaaggcaggcaacacgcatctgggcgtgcccgtgctcgaccccaacgaagccgacaagcgtcatgaggaaatcctcaaggccggactgcccgcacaagacctggccgatttgattcgtcaactctctgaacagatgcacaccgccgccgagcaactccaattcgagctcgccgcccgtctacgcgacgaaatccgcgacctcaaaaaagagctgcgtcaaatgactgaggcgaataagtaaacccgtcacagacataagttagtgtagggaatcatggcagaaaccccacttgcatttgaaatcatcacctttgtggtgctcgcactgttcttcatcgtcgacctgttcgtcattggccgtcgcccgcacgtgccttccaccaaggaatgcgtgcagcatatcgcgttcttcgtggtcatggcgctcatattcggtggatgcatctggtttttcgctggttccaagccggccatcgagttctattccggctggctgaccgagtattcgctatcgatcgacaatcttttcgtgttcgtcatcatcatgtcgaacttcgcggtgcctaagcagattcagaagtatgtgctgtctgtcggtatcaccattgcgttgattttccgtggcctgttcattctgattggtgcggcactgatcacccgtttcacctgggtgttctttatctttggcgcattcctgatctacaccgcgctcaagttggtgcttggcggcgatgaggatgaggaataccacgaaaacggcatcatccgtgcgttgcgtaaggtcattaagattaccgacgattacgacggcgagaagctgcgcaccaccaagaacggcgtgcgctattggaccccgatgctcatcgtgttcctgaccatcggcaccaccgatgttatgttcgcgtttgactcgattcccgccatcttcggtctgaccaaggacccgttcctggtgttcacctccaatgtgttcgcattgcttggcctgcagcagctgtacttcttgcttggcgccttgctcgacaagcttgtctatctgccgattggcttgtccgtggtgctgggcttcatcggtgtcaagctcattatggaggcgctgcacggcaatactctgccgttcatcaacggcggcgaaggcgtgcattgggtgcctgaagtgccaacatggctctcccttgctgtgattgtcctggcaatcggcggagcggctttggcctctgtggtcaagatgaagcaagtggaaagcgctgagaaggcctgaaatcatagggaaatcaacccttcaaaacccaatcggcgcaacagtgtgagcgctcacaacacaccggggaataaacttgtcatgagccggtctgcgctagtagactgggttgcggcaagtgaggcaatcgcgcctcgaaccaaaaaagaacaagaataggcaggcattcatgcgtaaagccaagatcgtagataccatcggtccttccaccgaggattacgacaaccttctcaagctcgtcgaagcgggtatggacgttgctcgtctgaaccgctcccacggcacccccgaagatcacctcaatgtgtacaacaacgtgcgcaaggccagcgaggccaccggccgcaacgtggctgctctcgttgatctgcagggcccgaagatccgttgcggctggttcaagaagaacgccgacggtgaggacaaggtccagttgcagctcggccaggaattcatcatcaccaccgacgacgtcgagggcgacgagcacatcacctccaccaccttcaagggcctgccgggcgattgccatccgggcgacccgatcctgatcgatgacggcaaggtccgtctcgaggtcaccaaggtcgagggcaacaacgtgtacaccaaggtcatcgtggccggccccgtgtcctcccacaagggcatcaacctgccgggcgtcgccgtctccctgccggccctgaccgagaaggatgaggctgatctgcgctgggccatccgcaccggcgccgacatcatcgccatgtccttcgtgcgtttcgccaccgacatcgaccgcgcccacgagatcatggacgaggagggccgccgcatcccgatcgtcgccaagatcgagaagccgcaggctctggaaaacctcgaagagatcgtcaagaccttcgacggcgtcatggccgcccgcggcgacatggccgttgagtgcccgctggaagaggtcccgctggccaccaagcgcatcatcgagctggcccgccagtacgccaagccggtcatcgtggccaccgaagtcctcggctccatggtgaactccccggtcccgacccgtgcagaggcctccgactgcgccaacgccgtcctcgacggctccgacgctaccatgacctccaacgagaccgccgttggtaagtacccggatgtgaccgtggctaccatggcccgtatttccgcttacgccaccgaccacggcttcgaccgtatcccggagctcaagaaccttgacatgtcttccaccggcgctgtttcctccgctgctgtggatctggctgacaagctcaacgccaaggccatcgttgcttacacccagaccggttccaccgtgcaccgcgtgtcccgcgagcgtccggccgctccgatttacggcctgaccaacaacgagcacacctaccactggctggctctgtcttggggcaccgaagccttcctgctcaaggaggactaccacgacaagtcccgcaaggacctcatgatcttcaccgacaaggtcctcaaggacgccggcaaggttgttgacggcgacaagatcgtcatcctgagctccgcccagggcgatcaccagccgggccgcaccgactccatctacgtgcacactgttggcgcctgcgactgattattcgctcgctgactagcacacgttagtagtagacgaaagccccatccgattggatggggcttttcgttgcgtagggagaggaatcgcattcgaggcgaattgcggctcttgcctcctcacttagtcattgagagtcattgagatgctgcaggctgccactcttcagtcgcagaatcgcgatcacggttttggcatcgagaatcgtaccgttgaccaccatttcataggcctcgtccaccgagaccagtcggacgtcggaacgaggcgtttccggcccgatctcctgacgagacaccggcttgagaccggtggcaaagaatatcgaggtgtgctgggtggaatagctcggcgtattcatgaaccgggtgaactgcgtgaatttgtcggcgtcgaatccggcttcctcggccagcttgcgcttggccacatcggtcgggcgttcggaagggttgttggcgtgcccagctggaatctccaatgtccaccgatggttggcaatgcggtactgctcaaccaacggaatcatgccgtcttcggtgacggccaacacagcgacggtgtcgccgttgttttcctggacaaaatagcgttcaaacgagccgatctgattcgattcgtacgagacatgatcgacattgaaataatgcgtttccacgatttgcctgcgggaaatctccttgaccggagaaggacgccacgggtcaaactggcggtaggtttcgttgctcatacgccctcctaacagaagcagaacatcaacctatggcctattgtaggccgtggcgacacgcctgacgataggcaacactcgggtacgccgttagcgatgatgatggctatcgcgtgtcttttggcgggagagtcgaattgatatgctaagctctgcaagagtgctttggcacgccctcgtatcccaattggtagaggaagcagcctcaaaatctgcgcagtgtgggttcgagtcccaccgagggcactttcgcaaaaaggtcagactcaaataacgaccttcgcgaatcgcgaggggtcatttgtatttggtcacaatcggaaaagagggtggcatggctgcaaggaagaagtccgaggaaccgagcatcgacgtcgacgaggtgctgaccgacgaagaactcaaggctgtggccgaggaagacggcgagcctgctgaacgcaaaaccaagcccgagaacggcccgcgtaccgttgtcgtggccgaggacgaggccgtgaatcgtatggatttggtggccatgctcgaagacaatggttacgaggtcgtcggccaggccgccaatggcgaggaagccgtcgaactgacccgcaagttccgcccggacgtggtgtgcatggacgtcaagatgccgcgtatggatggcatcgccgccgccggcatcatctgcgacgagaacatcgctcccgtggtcatgctcaccgccttctcccagaccgatttggtcaagaaggccaccggtgccggtgccatggcatatgtcaccaagccgtacgaggaatccaagctcctgccgactctcgaagtcgccatgggtcgtttcgctgaaatcaacgatcttctggacaacgtcgagcgcagcgaacgcaagcttcaggaaaccaccgatcagctcaaggagaccgaggaaaagctcaagaaggctgaggacgccctcgaggaacgcaagcttgtggatcgtgccaagggtctgttgatggacaaggccgacttctccgagcagggtgctttccgttggattcagaagacatccatggatcagcgcattcctaagaagcgtcttgctcaggccatcatcgccaagtacggcgatccgaagccatccgagaccgacgagcgctgagcgctgagccaacaaacaaacgaaccaattaagggagaggccagcgtgaccgagcccaccaatgaaactttgctggtggtggatggccactcgctggcctttcgtgcgttttacgccctgccggttgaaaatttcagtaccgcagcagggcaagccactaacgcggtatggggctttgccaccatgctgtctcaggtgattgaagcggagaagccagaccatctaggtgtagccttcgatatgaagggcggcacgttccgcaacgacatgctcccgcagtacaagggcacccgtgaggccgcgcccgaggagctgcttacccagctgcctttgattcagcgcatgctcaaggccctgggcgtcacgtatatcgaaaagcaggggtatgagggcgatgacatcatcgccactctcgccactatgggagacgacgccggctatcacacgctggtattgtccggcgacagagatgccttccagcttgtggacgacaacgtcaccgtgctctacccaggccatcacttcaaagacctgaagcatatgacgcctcagtccatcgtggacaagtacaaggtcacgccggcacaataccctgatttggcggctctgcgtggtgagaccgccgataatattcccggtgtgcccggcgtgggcgacggatatgcggccaaatggatcaaccagtatggctcgctggatgccatttgcgaacacgccgacgaggtcaccggcaaaaaaggtgaggcgttgcgcgccaatatcgatcaggtcaagctgaaccgcaaggtcaatgcgctggtgcgcgacgtggatctcggtgtcgatatcgaggatctgacgttcggctcagtggatgtggcccaggttgatgctctcttcaaagagctcgagttcggtccgcgtaccaagacccgcgtgatgaagattttcaatggtggtgtgagcccagctggaaccgcccagggagcagcggccgcacagtcggatggtcctgcagaagacgagctggattccggtttggacacaccgaaaatcacggttattgaatccgcggcacagttcgagcagtgggtcgaagcccatcgtcatgagatcaatgttcctgatgacattgttgatttcccggtttccgattacagcaatgaggccgaacgtcacatcatgtgcggtgacgcggtcggtcatgcctggacggtgaccgcatggggagacgcgcggcccgggcgcgcccatgtgcaggcatgcgccgttgctacggcatcctcagcggccattatcgaggctccgatggcatcatcagtgcagaccgctcttgatcggttcctgaaagccgagcatttccgtaccatcgtccatggatacaaggaactgcttcacctgctttctgccgccggattgggcatggcattgccgatgttcgataccaaactgggcggataccttgcccagcctgacttccatgccgacaatctcaatcaggcagccgaacacttcctggatattcatgttgtcgatgccgagcagccggcccaaggtgtgctggatttcggcgacgaacacaccgaggaagacctgaacgaacggcgtgtgcatgatttggctgttatccgcgaactggccgttactttggggccggtcatcgacgagcgtcggcaatactggctgatgcgcgccattgagctgccggtttcccgggtgctgcatggcatggagcattcgggggcaaaaatcgaccgttccaggctcaccgacatgcgtgaccggtttgccaccgatgcccgtcaggcacaggaaatggcatggcagtatgcaggcggtgagatcaacctgcagagccccaagcagttgcagaaggtgctgttcgtagatatgggtttgaagcccaccaaacgcaccaagaatggctcttacaccaccaatgcggcggcattgcagaatctctacatccattccgtggataatgagcaggccaatggattcctcggggcgctgctgcgtcatcgggaaaccaataagcttaagcagattgtgcagacgcttattgatgccacgaataaggcagacgagcgtatccacactacgttcgagcagaccgtggccgccaccggccgattgagctcggtggacccgaatctgcagaatattcccaaccgtaatgcggtcggacgtgagattcgtagtgtgtttgtgccgggagaaggctatgaggcgctgatgagctgcgactattcgcaggtcgaattgcgtattatggcagatttgtctggcgatgaggctctgatcgaggcattccgctccggtgcggacttccataaatatgtggcctcgatggtctatggcgtgccggtggatcagattaccggtgaccagcgcagccatgtaaaagccatgagctatggccttgcctacggattgagcacctatggattggctcagcagctcaacattgcgcagcgtgaagctgaggccctgaaaaaccggtatttcgacaccttcggcaaggtacacgactaccttgaatcattggtatcgactgcccgcgagaaaggctataccgaaacgattttcggtcgtcggcgctattttccggcgctgcgttccacgaaccgcatggcgcgtgatgctgccgaacgcgcagcgctgaacgcgccgattcagggttccgccgcagacatcatgaaaatcgcgatgattcgtgctgggcaggctctggacgaggccggtgtgaagagccgcattattctgcagattcacgatgaacttgtggtggagattgctccgggcgaaagcgagcaggtcaccgagctgattcgcaatgccatggaacatgccgtcgatcttgccgtgccgctggatgtgtcctgcggtatcggatcggactggcagctcgccgcccactgattcgttgacggtttcttttgccgcgcagtatgagttgccctcccaccgagggcaaccattaacgtagcagactgcggaaatttgatgaagggtgcctgcaaaccgcaatcgctgtcatctccactacaatgagacctatgccgaacctcaagcaagttatcgacgttctcgagaccctgtatccgttgcgttacgccgaggaatgggatgagccgggcctgattgtgggcgatctaaaccatgaggtgaatcggattgtcttcgcggccgacccgacctcggccatagtggataaggccgttgccaccggcgccgacctactcgtcacccatcatccgttattcttccgatccgtgcatgaggccagcggacttggtttccgcggcgatattgtccgtcgcctgtaccagcacggttgtggattatgggtgggacatacgaatgccgatgccgcataccgcggcgtgggacaggccgcagccgattatttcgggcttgttggctcgcaaccgcttgtacccatcgaagatacggcggccgcgcatccggtcgggcttggacgtgtgggtcgtttgccggagccaatcacgctcaaggattttgctcagcgcgtattcgatgaggtgagtgaccatggcatggtcactgccctcggtatccagatatgcggcgatccagaggctctggtgcggcgtatagccatcttgccaggctccggtgattccttgttcaatgaagtgcgcgcgacaggcgctgatgtatacgtgaccagcgatttacggcatcatccggtgactgatgccattgaacaggcgcgttacgaggcgcgaatgcgcggtcaaggcattgccctcgggcagggggagagcggtgatgggcatgtgcgtccttatttcatcaacacaccgcatgctgccatcgaatccatgtggttcaattatgcgcttgaggatgtgcctgttgccgtcgaacgggcgacaggttctcgtcccgaggttgaatggttccgcgacacgactgacccatggacgctgtccatcacctcccgtcaagactgagccactacagtagggtattgaaaacgtttgcgaaggagaggcatgtttggcgaaagcaagcgggaacaactcgtgcgccggcttgatcataagctgaacgctacttctgacggtatcgacatggatgtgcccgccaaggtggtgagcagtgaaaccgtgtataccggccgcatcttccatgtggacgatatgcgtattgcattgaccgacaaaggcggcgaagaacatgaaatcagccgtcaggtgttgcgccacgcgccttgcgtagtaatgctcgtgcatgacatgtccaatgaccgataccttatcgaacgtgaatatcgtgctggttcggacatgttcgcctatgggctgcccgcgggtcttatggacgagggcgaggatgtgcttgacgccgcattgcgtgaattgggtgaggaaaccggagtggttcctgactgtgatgccatgggtgtcgactatgtcggtgacttctattcctctgagggcatgaccgacgagttggctcacatcatggtgctgcatctcggtccgttcaaacatgagccacggcatttcgacccggatgagcatgtggagtccgcatggattccatggagcgatctggccgccacgcgcatcacctcctccaattcaatgatcgccatccagcacgaggcgctgcgcaggctcctcgccaagaattccgacaaagacaagccgacgttattctcctgacgttcaccgtgcccgaacatcggtaacacaagaaagtgggatactgaagagtatgcagatcagaccaggatcaatgtatccgctgggtgccagctatgacggcgccggtgtgaatttcgcgttgtactcgcaggttgcgcaaaaggtggagttgtgtctgttcgacgaagatgatgcggagacgcgtgtcgagatgaccgagcagaactcctacgtatggcataactatattcctggactgcagcccgggcagcgttatggttaccgcgtctacgggccgtacgacccggcgaacggtctgcggtgcaatcctaacaagctgttgctcgacccatatgccaaggccatcgaaggcaatatcgacggcgacgaaagcctgttctcgtactggttcaagagtccggacgacaacacggcgatgaacgacctcgactcggcggctcacaccatgaagtccgcggtcatcaacccctacttcgattggggcaatgatcagcatccgtatattccgtaccatgattcggtgatttatgaggcgcatgtgcgcggcatgaccaacctcaacatggatgtgccgccggatatccgcggcacctacgcgggcctggctcatccgagcgtcatcgaatatttgaaaaagcttggcgtcaccgccattgaactgatgccgattcaccagttcgtcaacgactccttcctgcaggaaaagggtctgtcgaactactggggatacaacaccatcggcttcttcgcacctcacaacgcctattcctcttccggggaacgcggcgaacaggtcaacgagttcaaggccatggtcaaggcatatcatcatgccggcatggaggtcattcttgacgtggtgtacaaccacaccgccgagggcaaccatatgggccccactctgagcttcaagggtatcgacaacgcctcctactaccgactggtggaaggtgatcagcagcactacttcgacaccaccggcaccggaaactcgctgcttatgcgctcgccgcatgccctgcagctgatcaccgattcgctgcgctactgggtcaccgaaatgcatgttgacggcttccgcttcgatctggccgccacgctggctcgccagttccaggaggtcgacaagctgtccgcgttcttcgacatcgtggaacaggatccgatcatctcgcgcgtcaagctgatcgccgagccatgggatttgggctcaggtggctatcaggtgggtggcttcccgtccagctggtccgagtggaacggtcgctaccgcgataccgtgcgcgacttctggcgctcgcaaccgtccactttgcctgaatttgcttctcgcctgatgggcagctccgacctgtatcaggtcaatggccgccgaccggtggcatccgtgaacttcatcaccgcgcatgacggcttcacgatgaacgatctggtcagctacaacgagaagcacaatgaagccaatggtgaaggcaaccgggacggtgagagcaacaatcgttcctggaactgcggtgtggaaggccccaccaacattcgcgacgtcaacgaattgcgccagcgtcagatgcgtaacatgttctccactctgctgctaagccaaggcattccgatgatctgcggtggcgacgaagtggcccgcacccagcagggcaacaataacgcgtactgccaggataatgagatttcgtggaccgattggaatctcgacaagaaccaggaagagcttcttgcgttcgtctccaagctcattcatttgcgtttggaacatccggtgctgcaccgtcgtcgtttcttcaccggccgcgaaccgggcgacgactccaacacgattccgcaggtcgaatggtttgaccacaccggttccatcatggatatggacgattggcagaacacccatgcgttctccatgatgatctacctgaacggatcggatattcccgaggtcgactggtatggcaaccggatggtcgacaacgacttcatcctgatcttcaacgcgcattacgagccgatcatgttcactctgccggatgagcgttacggccgtaagtggcagctggtcgtggatacgcacaacccgaatgggccggaactgagctatgaggcgggcttcatgatcaccgcccagtcccgcagcttcctcatgctcatgagcgccaaaaagcccaagaagcccatgggcctataaccagaccgaagtcaagctccctctgacgagggagctcccggtgtagccgggtgagggagagaccgcagcaaagccgcgaacccctactcgcgccccttacgctcctccacgagccgagcatccccgagcgcaagcggatgcttgccgacaagcgggcgcggctggtcgaacagctcgcggaaatccaggattccatcgacttcatcgacgccagacagcgcttctacgacaacgtcctatccggtgcaaccccatacgtgagcgtgcttatcccgtccgccgcgcttgcaaaggagtcagaggaaccgggagaattgaagggggcggagaggaaataggttcgaccgagccgtttcttcctccgggatgcaagcgcgaacaacggtttgttgtacccgcgcttggcgaacgggccatgcccttagactggaatcagcaagcgcacagcgaggcgctcgaatcgttttccgatgtcgggaggtagtcatgtcgattggtcaggttatcaaagtcgttcgcgaggagcgaggtcttacgcagtcgcagttcgcgcacaagctgttcgtcacccaacaggcgctttcccgctgggagaagggaacggcagagccgagcatcgacatgattcggcttatcagcacccgttttgaggtgccgatggcgaggcttatggagatgccggacaacggtttttgccaaagttgcgccatgccgttctatcgcccggaagaccatggcaccgaaccggatggaacgcgaagcggagattattgcaactactgctatgacgacggcgtttttcttcaggactatgccaatagcgatgaattggtcgccgcgtgtgcgccgatgatggcggaatcctgccatatcagcgtcgaacaggccgaggattgcatgtcggcgctgctgccaaacctcaagcggtggcggcgtcaggacgagatcgatgcggtggcggaaggggaatgagcgatggcgttcgattataagaaggagtataaggacctgtatcagccgaagaccatgccggccatcgtcatggtaccggcgatgcggttcgtcgcggtggacggtgtgggcgacccgaacgaagaaggcggcgattacgccaaggcgatgcaactgctttacggcatttcgttcaccgtcaaaatgagcaagaagtcaaagaacccggccgagcatatcggcgggtacttcgactacaccgtgcctccgctggagggcttatggagcatgggggagggtgtgtccggcgtcgattacgcgcacaaagccgacttccattggacttcgatgattcgtctgccggaattcgtgaccgataaggtctttgcgtgggccaaggcatcgtttgccgccaaacacccggaatccgacgtcaagcgcgcatatctcttcgatttcgatgaaggcgtggtcgcgcaggtcatgcacaagggcccgtacgacgacgagcccgcaaccgtggcgattctggatgactacgcgcgctcgcaaggctacgagctcgacctctccgacgcccgccgacatcacgaaatctacatatccgatccgcgccgagcaaaaccggaaaacctcaaaaccgtcatccgtcatccggtagtgaaggtgggttgactttcagcgaactgctcgaagcgctcaccgcgcagtagcgcgaacaatctgccggaatcctcaccgtggtcaaagagcgctaccaagaactcgataagcaaaataactagaagcactggttcctctcggagagattctgcccgagcgaccttatgaatccggcacaggtcatctttcccggtgcaggaagcatccaggcccatgtgcattgatgacgccgatggattgcagataggcgtagacgatggtggtaccgatgaatcgcatgccgtacgtcttgagatccgctgcgatggcgtcggacagaggggatgtagtcatgcctgtctcgtagatgacgtgacggccggtgaaccgccaaatatagtcgtcgaaactgccatatgacgcctggatatcccggaatgcgttgcgggtattttggtgtcatttgagattgggaagcggaaatcgatgtcgcatggaatcgaactgactagcaggtggggtcccaacatcacaaaagtcccttagaccgcaaggccatataggttctacggtcatcggataaaatcggataaatcgtttagcggccggataaaagaagaagcccagaatcgttgagattccaggctttttttgtttgtcgggctagcgggatttgaacccacgacatcctgctcccaaagcaggcgcgctaccaaactgcgctatagcccgatacgccattaaggcacaaggaattattataaacgacgctggatacattgcgtgtcgagcatatgaattcaaaaaggttccggattctcttgatagcatatgagcgacatcttcatacaatgatgctctacaacgactaggtttgaatctgcatctgctatttctatcaaattcagtaacaacattcatgaggatgttgcgagtcgtcacgtattttggcataataaacagtgctttggcccgcaagggcgaggctccaagtcgccgggggtattcccccggcattccttttcctccaacgttgtcaggagcccatttgagcgaattgagcatcttcgtggacgaatctggcgagtggggtaagctgtccgaatactatctcatcacattggtgcttcacgtccaatccgattctgtagcggaacatattgataagtatgaacgccatctggctgattccggcttgcctgatattccattccatgctggtccattgtttaatgggcatgacggttacgaagacatttcattcgcggaccgtaagcggttgttcttcgcgttcttcacgctcgctcgtaaccttccgttccgatatgtgacattcgcgcatctcaagaccatgtttgatggcaacaaaatccgatttgaggctcagctcaaacgtgacttagccgacttcttcctgtcgcatctggacgaattccagtcgtacgagataatcaaggcgtattacgacaatggtcagcagattgttgcaaatgcattgaagacttctatcagctatgcgctgtctaaggaggccgttgtataccgtgatgcacagccaaaagactatcgtcttgaacaggcggcagatctgatgtgtactgtcgaactgactgcgttgaagttcgataaaggcacggaaactgctactgatcggaaaatattcaagaaccggagagacttccgtaagaactatctcaagattctacgtcgcaagcaattctgaacatcattacgggaattacaagatttttgtagtgtttcagattttcagtagaatggcgacagccaaatcccgctggcttgctagtaaagcgttgtcctcggggggagctttgtttgttgttgaaagataacgcggcatcgaatagataggggaggaccggcatgggatgtcaccaacgtgcggaaacctccggcctcatctcctttctgatttgtgccgtcgtcggcgcggtgtccatgaacctgtacctgcaattcgcgcctgccatctggcagctgacccaacgccgtttcatggtgtgttcgggcatcgtggccgcgtgcggtgtcatctcgttcatcatcggatacgccagcaagtcacgctcgctgaacctcaaacacggttggctcgcgccgattcgtcgcatgttcgaaatcatcgctttgtcggtggtatacgcctcgaccatcttcctgtcttcgttcgccctgatcggcgcggccagtgacatgatgggcaaggcactgttctccggctatctttccagcgtctgcgcggccttcgccggcgtggtggggtatatgaccttcgtgcaggcggagatgatgaatgccaaaaccatcgccagcctgttgccgttcttcgtcatctccggcgtggttaccgccggcatgaccaccgacgatccatactggtatcacaacaatttctcccagctgggcgaccgcaccacattcgcggcacgcatgttcaactccacgctgattctggccggcacgtgcatcatcatcgtcagctacttcgccatctccgagctggtgaccaccgaacggctgcagcgcctgtggcatgaccacaccaaagccgacccgaaccgcggttatgagatttcgcatttcatgttccgtatagtcgtcctgtccattttgctgaccgtggccggcctggcgttcatcggcattggcgtgttccgctatacaccgcacaatctgttgcacaacatctgcgccaaaggcctgccgttcgtgatgttgctgctgtttgtcctcctgccatggctggcgccccgactgtccaaagcggtgatggtggcctccgatttggctgcactcgtatgcgccgcattctgggtcaatatgatgatggggcacaacacgcttaccaatgtggaggctctggctggactggcgttcctcggttggttcatcgtgttctctcgtcaaatcgctgccatcgaagctgatcgtattgccgcgcagctcttgcatgcccaagccatcgaaggtggactggaacagcccgccgctgaaccggaacagcaaattgaatctcgcatcgctgctgaccgctgagcccattcatttgctagatttggccttatgactgaacaactctcgaatctctggcctgcgccgcttgctacacgaccgttgaacgccacggtgacggtaccgggcagcaaatcgttatccaatcgttatctgatacttgccgcacttggcaatgaacccgtcactttggtcggattgctgcgttcgcgtgacaccgacttgatgatgggcgctcttgaagcattgggcgtgcgatgcgatgtcgataccacaactgacaccaccgtaacggtcacaccgccttcatccggccgattcaatggcaacgttgatgtgttctgcggcttggccggtacggtgatgcgttttgtaccgggactggcactgttcgccgatgggccagtgaatttcgatggcgatgagcaggcttatgcacgcccgatgaggccggtgcttgacggcctgaagcaacttggtgtcaagatcgaataccacggggaagtcggacgactgccgtttaccattacaccaccaaccgagcttccgactgctcaggctcgggtcagtatcgattcgtccggttcctcccagttcatctctggcttgctgttgattggttccaaactgcctggtggattgagactgacgcacacaggagaaaagaccccgagtctgccgcacatccgcatgaccgtggccgatgtgaccggtgccggcggtgcaattgaagccgatgagtccgcccgcacatggacggtcgagcctcgcgcgatacagctgtcggataaggtgactgtcgaacctgacttgtcgaatgcggcgccattcctcggtgcggccttgattgccggtggtacggtccgtgtaccgcattggccggaaaccaccacccagccgggcggtctgctgcctggatacttggagcaaatgggtgccaaggtatcgttcccgacgattgacggcgtgcgctattgcgaagtgaccggcgatggaactgtatgcggcctaggctcgtttgatctgaccgcagcgggagagattgcgccttcgctggcggcgattctggtattcgccgataagcccaccgatatggtcggtatcgggcatctgcgcggccacgagacaaatcgtctggaagccttggtcaatgagattcgccgcatcgggggagtggccgaggaattgcccgacggactgcgcatcgagccagtgccgtctgaggcactgcatgaggcgaatatggaaacctacgccgaccatcgtatggccacgtttgccgcgatgctgggactacgcattcccgatattcaggtcattaatgtggccaccacgcgcaagaccctgcctgatttcgttggtatgtggaacgggatgctggcataattcagctcccttcagtccgctgcgcggacagctaccctcagggaggagccaagttaaagagtccggcgcccctctttaagaggagccgtcgccggaggcgaccgaggggagcgcgacgcatcggacaaaccacggcattacaaatgagtgtggggctgattccggttggaatcagccccacactcgtgttgcaactagagactagttaatgacctaacggcggccactcacttggcgaaagtgttgccgtaggtgtcggtgccggcttcggcgattgcggcggacttgcgggcgatagccagctcttcgttcgtcggaatcacggcgatgatcacggaggagtccggagtggagatgatgcgcggttccttggaacgggtggagttcttctcctcatccagcttgacgccgaacggagcgagcttgtcgcacaccatcttgcgcacgatgtcgtcgttttcgcccacgccagcggtgaaggtgatcacgtcgcagccacccatctggtaggtgtagttgccgatgtagctgacgatgcggtgcacgtagacgtccagagccagcttggcgtcctcgttgccttcgcccaccagacggtggacttcgcgcaggtcgccgaagccggtcatgcccatcatgccggaacgcttgttgaacagggcgtcgagctcgtccacgttcatgtgggcgttgcggatcaggtggaagaccacagccgggtcgatgtcaccggtacggccacccatcatgaggccctcaagcggggtcagacccatggaggtctcaaccggcttgccggagacttcagcggaggcggaagcaccattgccgatgtgcagcacgatctgcttcaagccctcggccggcttgccgatgacgtccggcaccacggaggagatgtactcgtgggaggtgccgtgggcgccgtagcggcgaatgtggtactggtcggcgatttccttgttcagcgcataggtgctggcggccttcggcagctggaagaagaaggaggaatcgaagacgaagatctgcggaacgtccggcagcagggagcgcatgacttcggcgcccttggcctccgggccgttgtgcagcggggcgagcacagccagatccttgacctggttgatggtcttgtcggtcacgagggccggcttcgggaagatggaaccgccctgcaccacacggtggccgacggcaacgatgccggcgtcggacagcttggggccgtactcctcaaagaagccgagcacgcgcttcaagccctgctcgtggtcgtgaatcggctcttcaagctcgtgcttctcgccgttgtactcgtgcttgtagtggccgtcgaccggctcaccgatcttctcgacgagaccggaagcgaggccttcgccggattcgagatcaaccagctggtacttgatcgagctggagccagaattgatgacaaggacggttttcgccattgtgggcatcctccattgtgaattgaatgttcccgtggatacacgggttaccgttgattagattactcgttgcttgctacaaaatgtggcattacagcggctcccctcagagaggggagccggagtcggaatcactgcgcttcgatggcggtgagggcgatggtgttgatgatgtcctgcaccagggcaccacgggacaggtcattcaccggcttgttgaggccttgtagcaccgggccgatggccagcgcgcccgaggagcgctgcacggccttatagccgatgttgccggcgcacaaatccgggaacacgaacacgttgacgtgtccggccacatcgttgcccttggccttggtggcggccacgtcgggcgaccaggcggcatcgaactggatggaaccaaccaccggcaggtccggtgccttctccttgagcagcttggtggcttcctcgacaatatccacatccgggcccttgccggagccgagcgtggagtaggagagcatgccgaccttcgggtcgatgccgaaggcgcgtgcagtctcggcggactgcagcgcgatctcggagagctgctccgcatccgggttcaggttgatggcacagtcggcaaacacggccacgtgatccttgaagcacatgaggaaggcgccggaaacgagcttctgacctggcttggtcttgatgacctgcagggccggacgcacggtgttggccgtggaattgatggaaccggagaccaggccgtcggcgtagccgagcaccacgagcattgtgccgaagtagctggcgtcggccagctgcttgcgggcctgctcttcggtcatgcccttcttggcgcgcagctcgcacagcttggcaaccatgggcttcaagacgttctcgtcatccatggcctggaaacgggcgcggtccaggaacttgagaccgagctcctcgccgcgggccagaatggcattcttatcgcccacgatgatgagattcacaatctcacgctcgagcaggtagttagccgccttgataatgcggtcttcctcgccttcaggcagcacgatagtcttcttgttgctcttggccttgccgagcaggtcgaactggaaggcatacggggtgatgggtgcggtgttctccacatcgagcgctgcgagcacttcatcggtgggggcgttcttgcggaaggtcgccagcgccagctccttggtggattcgtcggtgaacggaatctggggcagcgtccagacgggcagaccgtacttggcgagggtttccttgacggagaaggcgtggcgcggttcgcagccggtcacgaaaatgccgagcaccttgttgccggcggtttccatgccctcgatggacagatgcacggtctcgtccagctcgtgcggccagcggtcgatggtgcacacggccaggaacacgccggccttcagatcggcggccacattcgcattgaattcgtagctggtcggatcattgacatgcgacttgtcggtgccgacgatcagtgcggcatccgcacgggacacatccatggcgtcgttgaatgcaccgacgatgtcaccacgggcggtgtccttgtcggtgcgcaccttgtgcacgtcaagtccggtagacagagccacgccaaggccagcattggacgcggcgagcagaatgggggtgaagtcgtcgtggttggacacggccggacggaacaccatggtcttgtacttggaagtcaatgcattgagcacgccgtacgcaacgacgttgcggccattagcgccttcggggctggcgatatatacacgggtcacggtcactgtgtctgtctcctttgatgtgcaacatatgtgggaccatatcccattgtagtggtcattgttatcgttcacggtgttgtgtcgcggcgggatgcccgaagaccaggctcagcattgccatcgaatccagcaaaccatacgaaattggcaataacgcagtgaacagagaaaacaagaagcgcgagccttgatacgactcgcgcttcttgatttgcggcaattcctcatacaaggaaccgccattgggttcccccacctggactcgaaccaagacaaagggttccaaagacccgtgtgctgccattacaccatgggggagcagtgggcttgcgcccacaagtgttcatttataccacacggctggaattactgaaagcccatgccatgtcgttcgcgtcgcttcatgagaagcaacaggactcacgcaaagaggaatccttgaccgtgatgttcggggtaagtgtcgaacagttcagccaccgaaccatcctcgaataccgcgcgaatggcgctggcaagcaagggggcaatggacagtacggtcagaccgtcccagcgcttctcgtccggaatcggcacggtgtcggtgagcacgacctcgcgtgcgccgctttccttcagccgatcgattgccgggccggacagcacgccatgggtggcgaccacggtcacggacttcgcaccggcttcctgtagcacgtggcatgcgcccgcgatagtgccggcggtgtcaatcaaatcgtcgaccagcacgcagtccttgccagccacgtcgccgaccacacggttggccacggcctggttcgggcgggtaatgtcacgtgtcttatgcacgaaggcaagaggaccgccaccgagtcgctgggcccactgctcggccacacggatacgtccggcatcgggggagacgacagcgacgttgtcaagatgcccctggaaacgatcgcggatgtaatcgaccagtaccggcatggcgatgaggtggtcgaccggaccatcaaagaagccttgggactgggcagcatgcagatcgaccgacatgatgcggtcggcgccggcggttttgagcaaatcgaagaccagacggcaggagatgggttcgcggccgcggtgctttttgtcttgcctggaataaccgagcagcgggcacacggcggtaatggagcgggcggaggcgcgcttcaaggcgtcgatcatgatgagctgttccataatcgccttgttaatcggcttgtaatggctttgcagcacgaacacgtcggcgccacgcaccgattcggtgtagcgcacatacatctcgccgttggcgaaatcgtatgtggtggtttccaagacatcgataccgagctgatcggcgacatcctgcgctaacttcggatgaacccttcccgtgacgagaatgaggttcttatcgggctttccttcaaggattgcgctcaccattactcccaacatgtggtctcgctgatgcacccaccagcatagctgttcttaacgaccgtaaagacacccttgcgttgcttggcgttcatctaacggccttgtagggcgggtcggatttgctttgtccgcatcgcggctgtttagtggccggcctgcacccattgctctatggcttttttcaccgtttgcgcgtacaggtcggttcctgcggaaggatgaataccgtcggaggccagcagctgcgtattcgcctgtgcggcggagtcccagtctgctagcacgacgttgtcttgatgggtgttcgcatagtcggacaacgcttgattggccacgggaatccagctgcggtcgccatggccgttgacgagcaccagcacacggtcagggccaatctgattgtgcagctgatcgagttgaccggtgcttattgcggaattggtggcaagcccgagaatgacccaactgcgcagcgttccggcattcaagtcattgttcaccatgccaggggccgccataatagagcgtgacacggcggcgtcaatctgaattcccgggaacacagcggataatccctgcgaggaagccagcatcacggagtcgccgattgcggtgatctggtcaccggtcggcatgccatgtcgtggcttggctggcgggggtgtgggggatcgcataagatcgctggctgtctgctgcgcctgactcgcctgttgcgactgcttctgctgctgcagggtctgagcttgctgctccaactgaatctgcacagaggttttctccggggcatgcacaaggccctgcgcacatccaaccagagcaacggcccaaacgatacccactaccaccgcgcagactatctgctttgcaacagggttacggtacggcaccagaacctccagtgccgattgagcagcggccgtcttttcaaccatcagccaggagaacgccacagccagggcggttagtatggcggtgatagccagaatgatgctgtacgacggaccttgaatcatgcgaggtaacgtggaccggacgataatccacaccggccagtgccacaggtagatgccgtatgagtagcgccccaatgccgctagcggcttgaacttcatcaggtcctgcatccacgagtcatcgctgatggtgcctgcaatcagtgccacagacagcacgctggcaataatgatgccgccgcggaatgcaaagtcatcttgctgcccgttcgccgtcatgataatgagtgccaccagcgctgtcagcgacatcgctggtgcaatcgtttcccagagacgttgccgtgtggttttcgctgcgacttcggcaatgttgttgggaatattgttgggtattgcgggaatattgacatgcacggaacctgagtccgctgccgctccggcgactcggggagcttgcggcgttgcctgattgtggcgagtcagccaccaagccagggccacgccgagcatgagacccacgctatgggtatcggtgccgaaataaacgcgggtcggatctgcgcccggcttgtacatcagccacatggaagcgccgctgagggcagcaagacccagaggaataagcgaggcaaaacgggtatcgcgaatcctccacatcgcccatgcgatgaacggcacgatgatatagaactgcgtcagcacaccgatgaaccacaagtgccgtagaatttgtggattcatctgctcgaagtagctttgcccgccggcaatggcataccagttgtaacagccgaacagcacggtgatgacctgattgcggatggcaaccagcaaatcccgttcggtcagccagcagacggagacgataacgggaatcagcaaaagcaaagccggatacagtcgaaccaagcgtcgaggaatataccgcctaagattcaacgagccagtggtggacagcgaacggaaaaggctgatggcaataaggaagccggataccgtgaagaatacgtcaacgccgtagaatccgcctggcatcttctgctgcacgcagtgatatagcacgatggcgataagtgccagacctttgataccgtcaagtccgacaaaacgcttcacagttttccatccctttgctgttgcgatttcacgattctcttctcttcgaacctcacaaaagaatcagggtcaagcatggtagaggggaacgacatcgaatgacatcgttcccctctaagcaatctgtctatattgctatcgctttattcccactcgatggttctggttctgctgtcccgtcactccagttgcacccagttttcggcatcggcacggaacgcgtgccgccgaatgacgcgatgtcgcgtttcgtcggcttcggggacaaaagttgggacaacctcaaaaacttttttcaaactcagggctttgagtttttgtttttgtcccaaagtgcgcggcgggtcgcctttggaggctcgatggcgccgaaaacgcccgttttgaaactcaaccgcccttttgcctgcaagccgccagctgcaatcgcaagtgaattaacgcgggtggcttgcgcgccatttgcaaaaccccaggtcgcaggtcttcgccattcgtgaacaaagtgagtagtctcaggtggcttgcttatgagttggcgaacgggccttcaggattcagggcaaacatgctggtagaataggattctcaaatcaatgacaggggaccgaacatggccgaaccccacgataggaagccgatcctcgcgatcgagcagcagatagagcacctcaagcagaagggcgtagccttcgagctgtgttccgaggaagaggccgcggactacctgcgcgacaagtgcaacttcttcaagctcgcatcctaccgcaaactcttctcgaaatacgagggaggcccgcgcgacggccgctacgtagacctcgacttcggccagctgcgcctgctcgcggcgctcgaccaggagctgcgccacgccctgctcggcatgacgctcgacatcgagcatttccagaaggtgacactgcttcgcgagatggaggaccgtggagaggacggctacgccatcgtggccgactacatggcatcgcttaccactgcaaacagggagtaccgcctgcgcgagctcaagatgagcggccgcagcccctacagctcgagcctctacgcgaagtactccggcgacatgcctgcctgggccttccttgagctcacctcgttcggcaccctcatcgacttcgtgcgcttctgcgccaggcgatggggcgacaggcgcctcgaggcctcccactacgacctcaagcgcgtgaagtccgtccgcaactgcgccgcgcacggctcgtgcctgatcaactgcttcgccgagaggggcgccgcccggggctcggcgtccagcggcgtctcccgaagggtcgccgccgtgggaattcccaaggcgaccaggaggaagtggatggggaacacggccatgcaggaggtcgcgaccgtgctcgtggcgcacttcggcttggtacccgagggctcctcgcgctcgcgcgccgcatccgagctcgccgagatgttcgccagggccgacggcggaaccgaggcgctgcccgacaaggggcccgacgccgcagctcgctccgcgctcgagttccttcgcaggttgacagaatcgctcgggttggtagaatagcctgcagatagcaaaaccttcacggttttaggggcggacttgcgcaagcgactctgccctatttttatattcactcgctataggagacgggtgatacctgggtcaatgacagacctgagaagcccggaataatggagccagttagaaaccctcgggtttgcggggcgggatcgtgagagcgattctgccctattttttttcctccgtctgccccaaaccaagtagttcgaagatagcctgtaggtgtcctcgtgggcgccttttattttcagggaatcggccgcttcatgaacgagcgaccggcttgacctagatcggaccgccttcatctccgtctaggcgccggcgatcaacatcgtaaatccgcgcgtgctacaatgcgggcaccagagatgaaaacacagtccccgtcgggtagtcgtgggcgtgcgggagtccgcatcagtaacctgcctcctggttgtcccttctctgcatggtcatctacataaaggaggaaccagccatgcagatcagcgtgtcgtccaccctgaccgtatatcacgacggccaattctgggtcgggctggcggagcatgtcgaggacggcagatacggcgccgcccgcatcgtcttcggcgcagaaccgtccaatgaggagatcctgcgattcgttgtcagcaaatgggcgaagctctcgttcttcggtcacgattcgaccgaggcgagcaagcccgcgaagaaccccaagcgacgcgcccgcgaggcggcgaaagccctcaagcagccggcgatgagcaccaaggcgcagcaggcgctcgcgaatcagcgggagacgatgaagcgggaatcggctcaagcaagaagccagcgtcgcgcggatgaggcggaggcgcgcttcgagcagcgaaaactgaagcgcaaacagaagcatcgcggtcattgataccgctatcgaccagtatatatagcagcaggcgtagcttcgattgaaactacgcctgccacctggtgctataacgttatacagaacgtatgttctattccaactctttcaagtccatttgccgtggcgacattccaattgggtctagtttggttgtcgatttgtccaccttgccgccgaatccctccgcgtgtcctcgcgcacgcgtttgggacaaaccctgggacaaattcgcaaactatttcgaaaccgcaagctcgcagtttcatttttgtcccggggacaaaaacgacaaggctttgaggcccggaaccgctcgaaaggggtgccaaaacggctgttttccctctttgacgcctgtttagcaaagtgaatcgtagccagcggctttgccgccttacatttccgcaggtcagatgagatgcacaagagcgatgaccgaaagaatcgtcgcgggcggcttattcacccaagagttcaacggctccactttcaaatgcatggggaaatgcgaatgacctcaatgcgctcccgaactcggcgctaacgtaaacgccgactccgtcgagcgaagactggccgatatgagtcacagcatcgtctccaaggctgatatgcctaagatggcttccaactgggggcggggtttgccaataggaaccacatgaagaaatgcagtgccctcggggtcctgctcagtaattccgtcagcgttcttctcaagccaatccagaagagcaatcggatcgtccatcacgtcaggtggcggagttggcatggaaggcaggttcttgttggtttccacctattgtacgcccgtcgtcgtgcacgaccaatcggacagcatcccggattcgatagctacgtgcgaagccttgacgctgtattttcacttgctgtccgcggacagcaagtccacaagggatagacgcacaagcgtcgcaagggagtgtagctcccttgacggaacgaagtgacgaaacaatctcggtcgtgcagttttcttctgctgaccgggaatgaagctccgcaggacgcacatactcccgataagagagtatagaagtgcgccctttagttcctaaagggattttatcagttcgacaaacttgaattatcaaattagtctttgcaaataacctttgaaccttcaccatcaattacaattccctgacggttgttaattgggcatagattcaaatccgaaaactcagtcattattttctcggtaactttcttaaatggtgctgtaagataatgcggaagaacatagaaatcaatcaaatcaagccccgcatcatcttcttgtgagtagtcctccggcttttcatccatttgttcaatatattggatggtaggagcgcatataatcgcacctgccgattcaccgatcatcagttttccctttgccaattctttcttcaacagcttatccgttcccgttttacggagctggtccataagaaagaaagaatttccaccagtaaaatatatcacgtccgcatcttcaaaaacagattgtatcgttgaataagcctccgttgaaatatcaatttcagttacggctgctcccagtttattaaatagctttcgagccgagccgacataaccggtgtagccttcacgcagcgatgctgttggaataaatgcgactattttgttatcaatttcttcttttatcaaacttcctacacttgaaaagtgcgaacataaaaacagcttcatccatattctcctttatatatttgttgctcaatttcgtgttcaaattacatccttgattatcaactttatccgaacacctcccacacgaaggacctcaatggctcgtgttattagggtctctatcaggattgttgtagctgaacatgtcgggaggctgctcatctgattgctcgggatgatcctgcaagaacttcctgagcacacgagaaggatcgaatccccagtaaaatttactatccttctgaagcgattcattgctcgcaagccgataaagctcccttagacacatggcaatcttgtcatcatcatcgtcggggaggagctctcttcgtgcctttggatcacctcctaggatttgcgaggcaacattagagatacgcttttcggaatagaagcaacaggcgggatatgcgagaccagtgcccacccctgcaacaaatacgcataagcagtaaaggaagtcaaaggagcataggagatcgaggtatctctcatgcgccgaagcgtcactgcccatatttagtccgcaatccggtgccacaatcgggtgattcgtggcgttgtctaaggcaactgtaatcatcatccccgagccggcttcgttgaaaagcccggcgttcacggccctaacctggcagtctcgtatccaggatgcatatatgaagtgcgaaggagatggagattgacggttgacgaagggggcaattaggtcccatcttttcatgcgaaccagctgtgcgcccaattcgtaacaagcaaccgccacagctaggctttttgaggcagaatccgccttactatcatcaattgcggcgtagcagtcgtagagagcacctgccgccttctcaaatatcgagtcgttgcaatagctaagggcataggctccgatgccggcaaggctgttgatcgcatctgcatcatcttgaaactctgcggcgacctgaaaaatgaagcgagaaagcttctcattctccttttgctcgaagcaagcttcgaacgaatgcacaagcgcttcttcatccatgccgtaaacgagaggcggcgttttacccttctctccaagaacggcgattatattgtccacgagagtatccattcgtttgctctcgtctttcctcacgcaagcatcgtgctgcttcaatatttctgcccactgtgaatactcaatgggccgattctgagctccgtcgcgcctaactatttcgccctcgcgaaatacgacaatttgacggcctttgccatctactgtttgtccgagcttcgaaaaaggaacgagaagcccgtcttcgaggcttaacaggcaaaccaaacagtatgtgtgtccatcaacctcatgtaattgggagatggcggtcaaaggcgcctgaacatattttcttattttgtctgttaagaccgctccgtcaaactgcacccagttggtatcctcgcttctagccgatggatttccgtcatcgtccactccaatgacgatgtaaccaccgggataacggttgcacatcgaaacagcgtcttttacaaaatcgagctcatcgatcttcttggaaaaatctagcgtctccttaaaatcgagctcgctgcattcaccgccagatttcaatagctcgaaaagtttttctctatcggttcgtccgtctactacgatcatctatgcgccaacctatcgatttcctatgcccgtcaaacaatctcttcatttcgttcatgcgggtggcaccaatcgtctgatacgtagagagcgctttcatcaacgcatcagccaaaagacgtcctcccatctaagttaatactggacattatcccatcgttttggctacttagagaaccatcgctatgctatccggtcaaatcaagtattgatcattaccactttcatgtggttgccacggtgagcgcaagcaaaccatcagctcaaacaacgaaaaccagttgtagcattgcgaaagaaagcgcactgaccggcgaaccgatgcccgctcgtccgttccagtttgcccagacgcccctcccacgatgcccatgtcccaatcgatgggtaacatttatccgggtgcacttggggcaacgggccggcagacccgcgcaaggtcgctcgcataacacgcaacatcaaacacgacagaagaggcgaacgacagatgccggaccccggacgacagcaccgcggaagacaagcactccgaccacaaccgaacaactccagctactaggcaggcgcccacatgggcgccttttacttttcagggacttagccgagagctaatgcacgcggctcatggctgtttcgtgaaggctcgaccagctcgacccacctcgacccgtctccgctcccgccgtgcgcgccaaccgccatcagcggttcaatcgtcgcgaagacgaaaacgcacgcggaaccgcgcagacgcatcgcgcggaaagattggaagcagccatggcgcacgcgacgaaatgcgccgcgcccgagggcaaccggggccgcgacgagtggatgacggtgatcgagatgcaggagtacatgggggcgagccgaagcaaggcgtacgacctcatctggtcgggagagatcgactcgtacaggctcggcaggaagctcctggtttcgaggtcgtccgtggacgcctacatcgagtcgaggagcggcagaaaatgacggcggcgaccgccctgggagccgctcgcggccgggcacgcgagggagcctcgagacgaaaggagctcgagaacgaccatgaccaagagcattagcaggagacaggtgaggcccatcgtatcctccaacgcgatattcggcgccgacgaggcgtgcgcgatgctgcgcatcaggcgcgacgtcatgtaccgactcgccaaggaccccgacgcccctttcccatccactaatatgaggattggaaagcctcgttgtagaggctttccgcatttcgcaaccaatgaaaaccgagtcaggacgcctggctagatggtgagcgccgctcgcacctgcgtatgctgagtttttactccccattgcatgccaatgcatttccggtatgtacggggagtaaacgacgcggtggcttacatggcggcacacgacagtacgccgtggcttttccctgattgcccccgttttcattaagacggcaagattctttactccccattaaccacctggggaaacgccgtacggagaccactaaaatgcccattgagtttgatttgagcttcacgggccccgaaacggcaccgtttggccctcggggacaaaaaccgcgagtctactcacttgggataaatccttactcccattcccccgaataccgccccgtgccttgctgtcttgaagcgcggggagtaaatggcgaaatcgcaggtgagagggagtaaaagtgcaaagaaaaagcctccgtcccaacacgggaacggaggctcgattaccgtatttactcaccgccgtcgctggtggctttgccatgactctcgtacgaaacgaaactcagcggcgcagtgcggcactcaaaagtgcaggtcaaagccctagcggcttactcccactcaatagtggcgggcggcttggaggtgcaatccagcacgacgcgattgatctggcggcactcgttggtgatgcgcgtggaaatcgtggccagcacgtcataaggcacgcgagaccagtcagcggtcatggcgtcttcggaagacaccggacgcagcacgatgggggagccatatgtacgctcgtctccctgcacgccgacggaatggacatcggccagcagcacgaccgggcactgccagatgtcacggtcaaggccggccttggaaagctcctcacgggcgatggcatcggcttcacgcagcagatcaagacgttccttggtgatttcgccgatgatacggatacccaagccggggcctgggaagggctgacgccatacgatttcgtcgggcagaccaagttcggtgccgatggcacgcacctcatccttgaacagggtgcgtagcggctcgatgagctggaacttgatgtccttgggcaggccgccgacattgtggtgagacttgatgttggccgcgccgtcgccaccgccggattcaacgacatccgggtagagcgtgccctgtacgaggaacttgacttccttgccgcgggcgccggcctcttcgagtacctgacgctgggccttttcaaacgtgcgaatgaacttctcgccgatgatcttgcgcttacgttccggctcggagacgcccttcagcgccttgaggaagtcatcggccgcgtccacggtgatgagtttgataccggtggcggccacgaagtcatgcttgacctgctcgacctcgcccttgcgcagcagaccgtgatccacgaacacgcaggtgagttggtctccaatggccttgtgtaccagagcggcagccacggcagaatccacaccaccagacagaccgcagattacttcggcatcgccgaccttctcgcggattttcttgacctggtcctcaataatggaggaggcatcccaatcgttgggcaacgcggcgcagcggtgcaggaagttctcgatgagcttctggccgagcggcgaatgcttgacttccggatgccactgcacgccatacagcttgcgggactcatcggccatggcggcaacaggtgcgccttcggtatgcgcgagcaccgtgaagcctgccggagcctgctcaacggccacgccatggctcatccacgtggtctgctcggcgggggagtcggcaagaatgccctcggcatcatcaatcgcggcctcggtcttgccgtactcgcccagggcggccttatccaccttgccgccgagctcgtaggccatgacctggaagccgtagcagatgccgagcaccggaacaccggactcgaataccatagtatctatggtcggcgcgccgggctcgaatacggaagccgggccaccggacagaataatcgccttcggatccttggccaggatctcgtcaacgggcatggaatgagggaccagttcagagtagacgccggcctcgcgtacgcggcgggcgatgagctgggcgtactgggcgccgaagtcgacgacaagcacaggaccgtttgccattgattttcccctaacgtttaataggattcaccgtgggttgaacatcaacgattatcaccggtcaatacgacaagcccgacacgcgatggctctgtgcggaaaacgaacaaatttctggtcttcacaggaacaacacgccggtttcgaacatggcgaatcgaacgtacgacaatggcatgaacaaagggttttccgcttattctcgcccatttgcgcatttctgacatataaaccgaatgctcacaaaccaatggttgaatcgcacaaatattgaaatttccagcacaatttcgaacacacccgcaagaaatcgttcaaaagtcgtgttgtcctcgtaccatgacgattgattgggaacgggaatccttggcgccgcaaggaaccaaggcccgtgacctaacggaaataatcaatcgcacgatcacgtgcaggagtacaggagtacacatgacgagtcctgttattggcaccccttggaagaagctcaacgctccggtttccgaggagtccctcgaaggcgttgacaagtactggcgcgttgccaactacctttccatcggccagatttatctgcgttccaacccgctgatgaaggctcccttcacccgcgaagatgtgaagcaccgtctggtcggccactggggcactacccctggcctgaacttcctcatcggccacatcaaccgcttcatcgctgaccacggccagaacaccgtgatcatcatgggcccgggccacggtggcccggctggtacctcccagtcctacctggacggcacctataccgagaccttcccgaagatcaccaaggatgaggctggtctgcagaagttcttccgtcagttctcctacccgggcggtatcccgtcccacttcgctccggagaccccgggctccatccacgagggtggtgagctgggttacgctctgtctcacgcttacggcgccattatggacaacccgagcctgttcgtcccggccatcgtcggcgacggcgaagctgagaccggcccgctggctaccggctggcagtccaacaagctcgtgaacccgcgcaccgacggtatcgtgctgccgatcctgcacctcaacggctacaagatcgccaacccgaccatcctgtcccgcatctccgacgaagagctccacgagttcttccacggcatgggttacgagccctacgagttcgtcgctggcttcgacgatgaagatcacatgtccatccaccgccgcttcgccgagctgtgggagaccatctgggacgagatctgcgacatcaaggccgccgctcagaccgacaacgtgcaccgtccgttctacccgatgctgatcttccgcaccccgaagggttggacctgcccgaagtacatcgacggcaagaagaccgagggctcctggcgcgctcaccaggtgccgctggcttccgcccgcgacaccgaggcccacttcgaggtcctcaagaactggctcgagtcctacaagccggaagagctgttcgacgccaacggcgctgtcaaggacgacgtccttgccttcatgccgaagggtgagctgcgtatcggtgccaacccgaacgccaacggtggtgtgattcgcgacgacctgaagctgccgaacctcgaggactacgaggtcaaggaagtggctgagtacggccacggctggggccagctcgaggccacccgtaccctgggtgcctacactcgcgacatcatccgcaacaacccgcgcgacttccgtatcttcggaccggatgagaccgcttccaaccgtctgcaggcttcctacgaggtcaccaacaagcagtgggatgccggctacatctccgatgaggtcgacgagcacatgcacgtctccggccaggtcgtcgagcagctgtccgagcaccagatggaaggcttcctcgaggcctacctgctgaccggtcgtcacggtatctggagctcctacgagtctttcgtccacgtgatcgactccatgctcaaccagcacgccaagtggcttgaggctaccgtccgcgagattccgtggcgcaagccgatcgcctccatgaacctgctggtctcctcccacgtttggcgtcaggaccacaacggcttctcccaccaggacccgggtgtcacctccgtcctgctgaacaagtgcttccacaacgaccacgtcatcggcatctacttcgccaccgatgcgaacatgctgctggccatcgccgagaagtgctacaagtccaccaacaagatcaacgccatcatcgccggcaagcagcccgctgccacctggctgaccctggatgaggctcgtgccgagctcgccaagggtgccgccgcttgggattgggcttccaccgccaagaacaacgatgaggccgaggtcgtgctcgccgccgctggcgacgtcccgacccaggagatcatggctgcttctgacaagctgaaggaactgggcgtcaagttcaaggttgtgaacgttgccgacctgctctccctgcagtctgccaaggagaacgacgaggctctgagcgacgaggagttcgctgacatcttcaccgccgacaagccggtgctgttcgcataccactcctacgctcacgacgtgcgcggtctgatctacgatcgtccgaaccacgacaacttcaacgtccacggctacgaggaggagggctccaccaccaccccgtacgacatggttcgcgtcaaccgcatcgaccgctacgagctgaccgccgaggctctgcgcatgatcgacgccgacaagtacgccgacaagatcgacgagctcgagaagttccgtgacgaggccttccagttcgccgtcgacaagggctacgaccacccggactacaccgactgggtgtactccggcgtgaacaccgacaagaagggcgccgtcaccgccactgccgccaccgctggcgacaacgagtgatgacaccacttcggtgttgttagttcgctaacacgaagggctcgggatttgtcccgggcccttttcgtttccccgattaccggggcttcccacccgacatccgggcaaccgtctattgtgttgaagtgttctgaacactgaagattacttcaagacattccaagcgaagggaatacgtcagttatggcattatccgcagccatcgttctcgctgccggcgaaggcacccgtatgcgttccaacaagcccaaggttctgcacacctttgcgggcaagaccttcctcaacagggttatgaattcggtctccgcgctgaacccgggcactcttgcagtagtggtgcacttccaagccgagcgtgtcagcgaagcagcccgatcctatgacgagcacgtcaccatcgtgaaccaggacgatatccccggaaccggccgtgccgtgcagtgcgcgatggcccagctcgccgcccagtccgaacttgacggcccggtgctaatcgccgcctcggacatgccgctgctggatagtgagacgctgcgcaaactggtcgaattccacaccgcatccggaaacggcgccaccgtgctcaccaccatgcttgatgatccgaccggctacggccgcatcatccgtgaccgtgagggcaacgtgctgcgcatcgtcgagcagaaagacgccaaccgcagcgaactggccgtgcaggaagtgaacacctccgtctatgtgttcgaggcctccgtgctggtcgaggccatcgccggcctcaaatccaataacgcccaaggcgagttctatctgaccgacgcgttggagaccgccaagtccgcaggcaaggtcggcgcattcgccgcgccagatccgctcaccgtggaaggtgtgaacgaccgcgtgcagcttgccgcgctgtccaaagcctataaccgccgcatctgcgaacgctggatgcgcgatggcgtgaccattctcgacccggagaccacgtggattgaagacgacgtggaaatcggccgtgacgccaccatcctccccggctccttcctgcagggccacacggtcatcggacaggaagctacagtcggcccgtacaccacattgatcgatgcgacggtcgatgacggtgccgtggtcgagcgttcccgcgtgcaggaatcccacatcggcgcgcgcacgaacatcggaccgtggacctacctgcgtccgggcaacgaattcggcgaggacgccaaggccggtgcattcgtcgagatgaagaaggctcacatcggtaacggcaccaaggtgccgcacctgagctatgtgggagacgcccagcttggcgaccacacgaacgtcggcggcggcaccatcaccgccaactatgacggcgtgcacaagaaccgtaccaagatcggctccgattgccacatcggtgcaggcaacctgctggtggccccggtcgaagtcggcaataatgtgacctccggcgccggttccgtgattcgtcacgctgttcccgacgatacgatggtctactccgaaaacacgcagcataacgtcgagggctggaagcccgcttgggagcgctgaatcatgcctgcagtacaggattccatcaacgccatccgcgtggccgccgaggcggcagaccgtatcaaagccactgatatcgtggctttcgacgtggccgacctgcttggcatcaccgacatcatgatgattgccggtgcctcgaacgagcgtcaggtgctggccgtggccgaggaaatcgagaaggatctcttcctcaagtgcgatggccgtcagccgcgttcgcgcgaaggtctgaccgaggggcagtgggtattgctggactatggcgacttcgttattcacgtcatgcatgatgaagcccgtgaattctacggtcttgagcgtttgtggaaggattgcgagagcatcgatcttcagctcgagcatcctgaaagcgtggcggcatgacggctcagcatgttcgttccatattcttggttcggcacggacgtacgtcgtataacgcggcccataagttgcaagggcaggtcgacattccgctggatgccgtaggccaatggcaggtgcgtcagactgctgcagcgctgaaggacctatacgtcgatcgcaggccagaaactgacgaacgcatcatcgtgtgttccgatctgagccgtgcgcatgccaccgcacaggcttttgcagatgtactggatggcgccgaagtgcacgatgatcctcgcgtacgcgaacgcagttttggcgattgggacggtcacgccgtatccgaactggctgagcgatatcctgaggacttccgttcctggatggagcatcgcggcggcgagatgaagtatggcgccgaggccaaagaacatgtgggggagcgtggcgtcgaagccctgcgtgactggtccacgcgtgccggcacggacaccgatctctttgtgttctcccatggtgcgtggattgcacagacgcttcagacgctgctgggcatcaccgcagtcgatcccactttttcgacggtgatatccatgcgcaatgcacactgggtgcgtttggttcccatggatgagcctgatgacacgattcgttggcggctcatggactataaccacggtccagccgtcgccgataccgacgagtgggaacgggaacgttgatctgaacagccggtgattgtggtgtcgccaaatcacgccaatgtcatttggcgacacgccgatttgcaggatacaggaacccgtcgtaatgtagacaaggttcaaaaatggactgacaattgaaaacggggctatagcgcagctggtagcgcatctccatggcatggagagggtcgggggttcgaatccccctagctccacgacgaagccatcggcatgcatctggtggtttctccgctggttcatggcgggtcgaacgactcccatgaatcggatagcttcattcggggctatagcgcagctggtagcgcatctccatggcatggagagggtcgggggttcgaatccccctagctccacaaacaaggccggtgcaatatgcaccggccttctgtatttggcgtgcaccttagtcgtgcagcactccgaagtgcagcaaggcgtgtaatacaccgtcatgatccacatcatccgtgacatagtcggcagcggccttgggctcgtccgtggcgttgcccatggcgaccccgattccggcataggccagcatgtccgtgtcgttgccgccgtcgccaaaggccatggtttgttcgcgggtgatgccgtaatgcttcataaaacgctgaatgccccgtggtttgccaccatcggcgggaatcagatcggtgaagtccgggtgccagcgcacgccgcgtatgttgctgcacagtcccaccagttcgtcttccagttcggggtcgatgaacgggctgatctggaaggtctcgtgcgtcaacgcccgcaaacgaggattctcgaaatattggacgggggcggttttgccaagaccgctccaggtctgctgcaatgcctcgttggtatggttgaagtagacgtaatccttttcaccaaaatcacacaccacatcgggatgctggtcgagccaatccaaaatcacgcggatatcagactgatccaaggcctgtgattcaagatatccctgttcgtcaaaacaatattgaccattgaacgccacaatgccgtcgaatgagatcggcatggtgtccagcaccaccttcatctgagaaggagcgcggccggtgcagataagcaccttgatgcctgctgattgaagccgctgaatagcctcaacggtggaatcgggaaccttgtgcgtgacgaaactcgtgagcgtgccgtcgatgtcgaaaaacacagctttaatgtcagtggtagtcatgcttctattttcgaggctcctctcgacgcgccagacatgcttatagcgtgctatcaacatcaggcaacgcaatgtgttgcacgcgcgccataaaagacacctatacggcaatccgccatttttgaccatttctgggattttgggtgctacggtgaaacctgtcatcaacgtgatgggttcgcttggggaagcgaatcaccgtaagaagatgcaacagcaatttccatgagagagagggatcattcatcatgacagcagcaacccagccggcaactccggccgctcccaacagcaacgaaccggtgcgcgtgaaccacaccgcccgtaacatcatcattaccatcgtggtcgtggcgatcatcgccgtggccgcgttcttcggctaccgcgcggtggccggcgctaacgaatccagcgccaagggcagcaaagacaacccggtcaagatcggtgtggtcggtgccaccaacccggaatgggtcaagttcaagcagaatgccgaaaaggccggcatctatgtcgatatcgtggacttccaggactacacttccgaaaaccccgcccttgattccggcgagctggacctcaacgagttccagcacctgctctacctcgccaactacaacgtgagcaacaacaaggatctgcagcccatcggcggcaccgccatctacccgctcggcgtgtactccaccaaggtcaaggacatcaaggacatcaagcagggcgacaccgtcaccattccgaacgatgagaccaaccaggcccgcgccatcggcgtgctcaaggcagcaggtctcgtcacgctcaagggcgactggaccgccttctccaccccggccgacatcgatgaagccaagagcaaggtcaaggtcaccccgctgaaggccgaacaggtggccaccaccctcaaggatccgaccatcgccgccggtgtgatcaacaacgattacgtggccgacgcgggcctcaacccgaaagacgccatctatcaggatgacgccgaatccgaggaagcccgcccatacatcaacgtgtgggtggcccgcaagactgacgtgaacaacgagacctacaagaagctcgtctccatcttccagcagaaggacgtgctcgacgccctccaggagaactccggcggcaccgcggtgtttgccgacaagttcagcgccaagcagctgcagggcttcctgtccgacatcgagaaggacgccaaggcccagaagtaagagaaccatcggctggtttccgcaccgagctgtagtagcgagtattcgatgcgcgtagcctgctgaaccgtaacggagcgagccgcctgcatagggcccgctccgttacggcataactagaccggacgcaatcgccggtattccagcccatacaacattggagcaacagtgagcgatcccatcatcacttttgatcacgtggtcaaagagttcaagatacgaggacgaaaggccgagaccgcgcgagccgtgaatgatgtcagcctgagcattgaccgtggcgacattttcggcatcatcggctattccggtgccggcaaatccactctggtgaggctgatcaacgcactggagcggcccacttccggcacggtgaccgtgctcggtaccgacatcacggcactgaacgagagcaagttgcgccctatcaggcagaaaatcggcatgattttccagcagttcaacctgttctccaccaaaacggtgtcgcaaaacatcgcttatccgcttcagcttgatcattggcgcaaggactatcaggatcggcgcgtcaaagagctcctggaattcgtgggattggccgagcatgcggataagtacccctcacagctgtccggtggtcagaaacaacgtgtcggcattgctcgcgcgctagccaccaatccagaaatcctgctcgcggatgaggctaccagcgcgctcgaccctgaaaccaccaccgaggtactggcgttgctcaagcgagtgaatgaggaattcggcatcaccatcgtgctgatcactcaccagatgaacgtggtccagcagattgccaaccgtgtggcggttatgagttccggacgcgtggtcgaatccggtgacgtgtacgacgtattcgccgcgcctcgccagccagtcaccaaacggttcattgccaccgctttgtcggggcttcctgaggaaagccgtgtcgaacgtctgcatggcgagtggtcgggacgcattgtcaccgtactcatccggcaaaaggatgtctctgatgaccatgggcgcacattgcatgcctcagggcagaacatttcagagctgatcgccaaatatggtgtggaatccagcctgctgtatggcggcatcgatacggtcaagggatcggctatcggcgcaatcacctatgaattcaacggccctggatggcatgtggacgagtttttgcgtgaactcgcgcaacacagcgatgtcattgatttcggcaccgccgagaaaccagcggcatacgctgatgcggtcgccaatcatattgccggtgccgaagcggccatagccaaccagcaatccgtgagccaggatgagtcggcggaaatctccgccagccatgaaggagccaacgcatgattacccttgccaacccccgtagcgattggactgtgctgcgcccgctcctgtttgaatctatcggtcagacgctgacgatggtgcttatcactcttgtcgtaggaggacttcttggattgattcttggtgtggtgctctatggcacgcgtccaggcaatttgtttgagaacgccatcgtctaccggattctcgacgtgatcgtcaatatcgtccgcccgatcccgttcatcatcttcctggccgccatgcagccgttgaccattgtggtggtcggcacctccatcggtaccgtggccgccatcttcccgatggtggtgatgtgcacttttgccacatctcgtctggttgagcagaatcttgttccggtcgattccggcgtcattgaggcggcgcgttcgatgggcgccagcaaattcaccatcatccgtaccgtgctgattcccgaggccttggccccgttgattctggcctatgcgttcctgtttatcggcgtgctcgacatgtctgccatggccggatacatcggtggcggcggacttggtaacttcgccatcgcttacggttatcagaagttcgaccagaccgtcacatggacggcagtgatcatcatgatcgtgctggtgcaggtggtgcagggcatcgccaacgccattgccaagcgtctgctcaagcggcagcaatgatcaatgatgtctgccgagccctcgccaatatgaagcggaggcttcgtcatattgcccgtcctactacaatcgagaaccatgagtgaacatatcgatatcgaccacgaactcattaccatccgtcactatctgcacgcccaccccgagcgcagttttcaggaattcgacaccagtatctacctaaccgaccagctcaaggcgcacggcatcgaaatcctgcccaactccatggaaactggtgtggtgggtcttatccaaggggaagccgggcccggaccacgcatcggattgcgcgcggacatcgacggcttgcccattgtggaggattccgggttggaattcagctccgtcaacaaaggcgtgatgcacggctgcggccatgacctgcacatgaccggtctgctcggagccgccttctggcttgccaatcaccgcgacaaattcgccggctccatcaagatcctgttccagcccagtgaggagacggggcagggtgcccgtgcgatgattgacgccggcttggtggatgacgtcgatgccatcatcggtacccacaacaacccgaactatgcccctggtcagcttgccatcggtgctgaaccgatgatggctggctgtgtgaaattccatgtgacgctccacgctcaggggacgcatgccgcctacccgtacaaaggcaccggcccgcttgaggcgcttgccagcatgattttgagcctacagaccatcgtgagccgcaatgtgacgcccttccatccgctggtgctgtccgtcacggaagtgcatggcggcgacgtgtggaacgtggtgcccgccgaagccggtttccaaggcacggtgcgttacttccataaggaagatggcaatctggtgggtcgtcgattcaaggaggtcgttgaacatacggctgaggcgtacggtattacggccgatgtggactggaacgattttcaggatccgttggtctccaatccgtccctcgccaaggccgtggccgccgacgtcaacgattatgcgcagctcgagccgattcgtccgtcaatggcgggggaggacttctgcgagtttgcaaaagtcacgttgccggtgtttgcgttcgtgggctcaaacggccaagagggttgcgccgactggcacagcccgcacttcgtgggtctggatgaatccatccccacgttcgtcaacttctatgtcaacgccgccctgcgcgtactcaacgaattgaggtaaattcttctctggctcccctctctgaggggagctgtcgccgcaggcgattgaggggagccaggtggaggtcaacggtgagtacactaagaagctatgacacaacttcgcttcgcactcgcccagattgacacttgcgtcggtgcactcgacgccaacgccgccaaagtgctcgactattcccgcaaggccgctgctggggacgctcaagtagcggtattcccggaaatgacgctcaccggatatcccattgaggatttggctttgcgccgcaccttccgccaggccgcgtgggacaaggccaatgaactggccggtcagcttcaggacgaaggtcttggccatttgttcgtggtggtcggcactgtgggtaccgatcgggagaccagcaagccgcgtaaccgtctggtggtgctgcatgagggcgtggtctggaccggctatgacaagcacttcctgcccaactatggcgtattcgatgagttccgcatcttctccgcaggaaaccgttccgtgaccctcgaggtgaatggcgccactatcggcgtggccatttgcgaggatatctggcaggacggcggcccggtggctgaactcgccaccaaaaacatcgacttgctgttgaccattaatggctctccgtatgaggaaggcaagaccaacactcgttttgaactggcgcaacgccgtgctgccgaggtcaacgctccgcttatttatctgaatcaggtgggcggtcaggatgatttggtgttcgacggcggtagcttcgtggtagatgcggacggtacgttgctcgagcgcagcccgatgtttatggaagacctcacgttctgggatttcgacgccgctgccgaccatcagaccaaatccaccatcgtggccgaacttgatccggacgaagaggtgtacaccgcttgcgtgcttggcctcaaggattacatggccaagaaccatttcaacggtgtgacgctgggactttccggcggcatcgattccgcgttggtggccgctatggccgccgatgcctgcggcggcgataacgtctggggcatctccatgccgtccatgtactcctctgatggctccaaagacgatgctgcagatctggccgccaacatcggtgcgcactatgaggttcagcccattgagccgctgttcgtcgcataccagcagcagcttgatctcgatggcgtggccgcagaaaacctgcaggctcgcattcgcggcgtcatcgtgatggcaagctccaattcacgtggtctgcttgccgtggccaccggcaacaaatccgaactggcgtgcggctattcgaccatctatggcgatgcggtcggtggctatgctccaataaaggatttgctgaagacccgtgtctgggagatcagccgttggcgcaacaaggccgcagctgcgggcgttggcatcggcgggctcaagattgtaggcaatgaggaaggcaatgcgggcattcctttgaagaatggcgtgatgattccggtctcgtccatcgaaaaggcgccctcggccgaattgcgcccaggccagaaggattccgattcgttgcctgaatatgcattgcttgacaaggtgctggccgcctatatcgaacatgcccacggccgtgcagacctgttggccgacggattcgatgaggccacggtggacaccgtgatgcgtttggtcgatcgcgcagagtggaagcgccgacaatacccgctgggtcccaaggtcacagctcttgccttcgggcgcgatcgtcgcctgcccatcaccaacgcattccgtgaatagttgcaaaagaaggtaccaatggcagatgatgaaaagaatcagtggtattacaacaccgtcaagcagcgggctgaatatggcaagatctcgccgatagaacagcgtatgggtccgtacaagagcaaagaagacgctgaacatgcgtgggatatcgtggtagaccgtaacgccaaatgggatgaggaaaaccgccgctgggataactacggcgtcaaaccgtccgccggcaaatcgtcggataccgactgaccatatgtgttttcaccgcgatcggcgaacatgccgatggcggatgacagatagctacaccgctcaacttcgcatcgagagttgagcggttttgtctaatatcggccgtgacaatcggacggcggatgcctggaaaccgctggattggtagcgctcgcagaagaatgtgagatagctcactcccaatttcagcttttctcaagactgtgcaaactacactagtgaagcaagggttccgtgaagatgcgaaacctacaaccccattaaggagtgacatgaccgcagtagaaaatgcagctgtctcccaagaggagctcgacgccaaggcgtgggccggcttcaccgagggcaactggcagaaggatatcgacgtccgcgacttcatccagaagaactacaccccgtacgagggtgatgagagcttcctggctcctgccactgagaagacgaagcacctgtggaagtacctcgacgacaactacctggctgtagagcgcaagcagcgcgtctacgacgtggacacccacaccccggctggcatcgacgccttcccggctggctacatcgactccccggaagtcgacaatgtgatcgttggtctgcagaccgacgtgccctgcaagcgcgctatgatgccgaacggcggctggcgtatggtcgagcaggccatcaaggaagccggcaaggagccggatccggagatcaagaagatcttcaccaagtaccgcaagacccacaatgacggcgtgttcggtgtgtacaccaagaacatcaagatcgcccgccacaacaagattctgaccggtctgccggatgcttacggccgtggccgcatcatcggcgactaccgtcgtgtggctctgtacggtgtcaacaagctgattgccttcaagaagcgcgacaaggactccatcccgtaccgcaatgacttcaccgagccggagatcgagcactggatccgcttccgtgaagagcacgacgagcagatcaaggccctcaagcagctgatcaacctcggcaacgagtatggcctggatctgacccgcccggctcagaccgctcaggaagccgtgcagtggacctacatgggctacctggcctccatcaagtcccaggacggcgccgcaatgtccttcggccgtaactctgcgttcctcgatgtcttcatcgagcgcgacctcaaggccggcaagatcaccgagaccgatgctcaggagctcatcgacaacatcgtcatgaagctgcgcatcgtccgcttcctgcgcaccaaggattacgacaacatcttctctggtgacccgtactgggcgacctggtctgatgccggcttcggcgacgacggccgtccgatggtcaccaagacctctttccgtctgctcaacaccctgacccttgagcacctcggacctggccctgagccgaacatcaccatcttctgggatccgaagctgccggaaggctacaagcgcttctgcgccaagatctccatcgacacctcggctattcagtacgagtccgacaaggaaatccgctcccactggggcgacgacgccgccatcgcttgctgcgtctccccgatgcgcgtgggcaagcagatgcagttcttcgctgctcgtgtgaactccgccaaggctctgctgtacgccatcaacggcggccgcgatgagatgaccggcatgcaggtcatcgacaagggcatcatcgacccgatcaccccggaagccgatggcactctggactacgcgaaggtcaaggacaactatgagaaggctctcgagtggctgtccgagacttacgtcgaggctctgaacatcatccattacatgcacgataagtacgcctacgagtccatcgagatggccctgcacgacaaggaagtgtaccgtacccttggttgcggtatgtccggtctgtccatcgccgccgactccctggctgccatcaagtatgccaaggtctacccgatctacaacaaggatgccaagaacctcgaaggccacgagtacgagtacgtcgagggcgctgacgacgatttggtcgtcggctaccgcactgagggcgacttcccggtctacggcaacgatgatgatcgcgccgatgacatcgccaagtgggttgtctccactgtgatgggccaggtcaagcgcctgcccgtctaccgtggcgccgtcccgacccagtccatcctgaccatcacctccaacgtggagtacggcaagaacaccggttccttcccgtcccgccacaagaagggcactccgtacgctccgggcgccaacccggagaacggcatggactcccacggcatgctgccgtccatgttctccgtcggcaagatcgactacaacgacgctcttgacggcatctcgctgaccaacaccatcacccctgatggcctgggccgcgatgaggacgagcgtatcggcaacctggtcggcatcctggatgccggcaacggccacggcctctaccacgcgaacatcaacgttctgcgcaaggagaccatggaggacgccgtcgagcaccccgaaaagtacccgcacctgaccgtgcgcgtctccggctacgcggtgaacttcgtcaagctcaccaaggagcagcagctcgacgtcatctcccgtaccttccaccagggcgccgtcgtcgactgatgaccaaccccgcgatacgcggcaatgactaatcgaaggggtggggctcagctccaccccttcgttatttccccacatagactttcgcatcatttgggacaggaggacgacgatgcccgcaacacccacgttccgcaccactaccaggcatatgctcaaggaatcgaagacctatgcctcacagactttgatgggcggcctttccggctttgaatccccaatcggactcgaccgacgtgaccgcctctccgccctcaaatccggcgatatcggcttcgtacactcctgggatatcaacacttccgtggacggtccgggcacccgcatgaccgtgttcatgtccggctgcccgctgcgctgccagtactgccagaaccctgacacctggaagatgcgtgacggcaagcccgtctatctcgatgccatgatcaagaaggtcgaccgctacaaggacctgttcaaggccacgcatggcggcatcacattctccggcggcgaatccatgatgcagcccgccttcgtctcgcgtgtgttccacgcggccaaggagatgggcgtacatacctgcctcgatacatccggcttcctcaacaccaactacactgacgagatgctcgaggacatcgacctgtgtctactcgatgtcaagtccggcgacgaggagacttatcacaaggtgaccggcggcacgttgcagcccaccatcgatttcggccagaggctcgccaaggccggcaagaagatttgggtgcgattcgtgctggtgccgggactgaccgactccgaggaaaacgtggagaacgtagccaagatctgcgagaccttcggtgattccgtcgaacatatcgacgtgttgggcttccatcagctcggccgcccgaagtggcatgagctgcgcatcccatatccgttggagaaccagaaggggcccaacgccgctactcgcgaacgtgtggccaagcaattcaaagatcatggcttcactgtgtactaaatctcgatgaagctctcctcagagaggggagccaagttatatctctctggctcccctctctgaggggagctgtcgaacggagccgacttaggggacataaaattccccttagaagtggctaaaactcgcgccacgccgcgcgttataccgcgattgcgccaaaacgcccataccctagagatatggccgatatttacgcattccctacgggtgcgcccaatgaggggcaccccgaacgcccgcagggcgtaccggatgacgtatgggcggccgttgaatccgtgagcgccatgaagcgcctgtatgacgtgcgctatcgggaaattcccgttccttccacccttgccgactatggcattggcgtggaacttgaagcaggcgagcggatggatagccatccctttgccgccgacagtgtttccgagccgcatgttgccaccggatgggtaatgacgttgtattcgcacgagctgcgccctgattggaattccaattggcgatgcgtggcgttcgcgcgcctgccgctggaaccttccgaaaacgactccctcgccccgggcatgtattgggaagatatgtgcgattatcttggcgaagtcgaaccggactcgatttccggaactgtcaccgtcacccagaacaccacattcggcctgatggccggcagcaccagcgccggttgcgagatacgtgtctcatggacgccacttgacgggaccgggccaggcggtactatggacgccggcgcacaagtgaactcgtgggccgcattcatcagatcaactacccgtcgtgaggaggatgacgccagttgagtgacgtccatgacaccgaaccacggttactgaaagagccgcgcgggggagtgccggatgttacctcgacgattgaaggctatcatcacgtctgcgaagcgttggctgatgcttctggctccttggccgccgatgccgaacgcgcatccggattccgttatggccacgaggattggctgattcaatgcaaacgagaaggtgcgggcatcgcgttgctcgaccccatcgccttgacccaatctggtgccgactggaacgaattcaatgatgccgtgggcgatgccacttggattttgcatgattccctgatggatttgccgggattcgctgatctgggacttcagccgaaggcgctgttcgacacggagatcgccgcgcgtctgctcggtttgcatcgattcggattagccgccgtcactgaacattatcttggcatcactttggccaaggaacattctgcggctgactggtcctaccgcccgctgccacgagactggcgcaactatgcggcgcttgacgtggaagtgctgatcgagctcgaaaacctgatgcgccgtgatctgagagccgccggcaaggacgagtgggctgaagaggaatttacccatgcactgtccgaaggactcgcccctcgcaaaccccatccggttccgtggctgcgcatttcccgcatcacccagctgagccgtgatccgcagggattggccatcgccaagtctctgtggcaggagcgggacaaactggcccggcagcatgacattgcccccagcctgctgttgtctgattcctcgattatcgaggctgcgacgcgcaagccgcataatgccgcccagtttcgggctctgcgctcgctcaatgagcgtgtgcgcattcgcaccggcaccgagcaagacaagatgtttgaacgttatgccccaatccagcgtgccgtcaaacccaaggtttggaaagaggccattgatcgggccatggcgctgcgcccctcccaatggccgagtatgccggcacccgcgctggacgagaacggcatagtgaatgcaccgcgttcgatgcgactctggcagcaaaggcaccccgaccgatatgaccgactgcaaagggtccgtcgcgtgatcacttcgatagccgaagatacgcgtacgccggccgagatgattatcaagccgcagattctgcgcaacctatgctgggtggagaatccggccgaagtggacgtcgaggagttcctgatcgcgcagggcgcaagaaactggcaggtgaaactcattgcaccgtccgtaagtggcgttattatgtagaggttgccttacggcagaactgtaagaaaatacgacttttgaggagtcattagcgtgaagatcagcgttcgtaacctcgagcccaccaaggtgaagctcaccgtcactgttgaaccggaagagctcaacccgtatctggatgcggcccgcaaggaaatcgccaagcaggtgaacgtccccggcttccgtaagggccacgttcccggcaagatcatcgatcagcgtatcggtttcgctgccgtcgccggcgaggccgtgaacgacgccgtgccggagctctactccaaggctctggacgagaagaagattcgcccgatggctcagccggagttcgacgtgcaggacgtgccgcaggccgccaacgacgacaccaagctgaagttcaccgcgaccgtcgagcgtcgccccgacatcgagctgccggaaatcgatggccttgagatcgccatcgccaagccggaagtcaaggatgaggacgtcgacaagcgccttgaggcgctgcgccagcgcttcggcactctggtcggcgtggatcgcccggccaccaagggtgactttgccaacatcgacctgactgccgagatcgacggcgagaccgttgactcccaggaaggcgtgagctacgagctcggctccaacaccatgctcgacggtctggatgaggctcttgacggcctgtccgccggcgaggagaccaccttcgaaggcacgctggaagccggcgaccacgagggccagaaggccaccgtgaaggtcaaggtcaactccgtcaaggccgaggagctgccggagctggacgacgagtttgcttccgaagcttccgagttcgacaccctggacgagctcaaagccgacatccgcaaggccgccgctcaggacgccgaaggccgtcaggccaccgaggctcgcgatgccttcatcgccaagctgcaggaaggcctcgagattccggtgccgaagggcgtcaaggccaacatggtcgccgagcagctcaagggcatgaccccggatccggagaaggccaccaaggagcagaaggctcaggctgaggaaaccgtcgagaaggaactgcgcgaccagatggtgctcgacgctctggctgagaagctggacgtccaggtctcccagtccgacgtgttcaacttcctcgcttccatcgcccagcagtacggcatggatccgaacaacttcattcaggccatcatcaagaacggccagctcggctccgccgtgcaggaagtcggacgttccaagggtctgctcgccggcatgcgcgccgtcaagttcaccgccgatggcgaggctgtcgacctctccaacttcctcggtgaagccgctgaggaagaggagtccgagtccgtcgaggccgcttccgccgccgctgccgtggctgacgagctgtcctccaaggacaaggacgctgagtgagcctagtttgcttgcgttagcgtaactgttaagcccggaactgtgtttcatggttccgggctctttctattcttaaagaagtattgttccattggctcccctccttgaggtgagctgtcgagcgtagcgagactgaggggagttcccaagggcatactcgttgcataaagtgcggaggtcgacatgcaaccagtagttaccgccaaacgtcttggctggcttgcagcgacaaccatcatccttggcgtgatcatcggcgcgggcgcaggtctgctgacgctgctgctctacggcgtcgagcacgtgatgctcggctatgtcgagggttcggaattgcccggtccattcggtgtgcccgctgtacgccgtgcgatttcggtgaccatcggtctcaccctagccggcattatctggtattttctgcgcaacaagaccaccaaggtgccctcggtcaaaaaagccgtggcgggggagcggatgcctgtatggcagaccttggtgcatgtggtgctgcagatcggtatcgtcggttcgggcgcgtccattggacgagaagtcgctcctcgtgaactcggcgccatgttggcgcaacgtttctgcgacctgttccatatcgaaggggccgacggcattgaccgccgtatggtggtagcagtggcggcaggtgccggcttgggcggcgtctacaatgcccctcttgccggcatgttcttcgccgtggagattctgctggtggacgtgacccttgagaaggtcgctttcggtttgggcatgtccgcgattgccgcgttcgtgacggcgtcgattaagggccatcacacgttctatgacatcaccgccatgcaaccgcaatccacgcctaccctgatgctgttcgcggtgctgtgcggcgcagcgtgcggtgtggctggcgcatggtttcgcaaaggctcgcaatgggcggaatcccatcaatcgcatgacaagcatattttgtggcagatgccattggctggcctggtgactggattggcggcgatagttgttccgcaggtgatgggcaacgggcgcgctgcggcgcagcttggtttcagtacattcgtgccggagggctctgccgctgccggcgcatcgcaatcggcttcttcggcggcggcctcgccttggaatctgttggcgggcggcagcaacgtttccggttcggcttctacggcggttaatgccggtttccagttgtctcaatcgaatatcgccatgctgctgggtgtgcttgcgctgacgtttgttgccaaggcgttggtcacgctaatgaccattcgttcgggtgcctcaggcggcgtattgcagccgggcatcgcgttgggatccacgctgggtgcaatgctggggctcatttggatactgttgttcccggctgactcggtgactgcttgtgcgctgattggtgccgccgcattgctttcggcatcgcagcaagcgccgttgatggccatgtgtttggtgatggaactgaccgaagcacccagtgcgttcttcgtgccggtcgggttggccgtggccgcatcgtcactggtgtcgaagtggatgttgagccgtcgtaagtaggaagttattttggctcccgctggcgggagctggctcgcgaagcgagtctgggggtggttgtcgtcaccgccgaccaccctcagtcagcttcgctgacagctcccgctggcgggagcggaaagaataagctatgtctgaaaacactgagattcgtgcggcgctggaatcgcttgctgccgagccattgtctgagcagatcgactattaccgcaagccgtttatggtgttgtgggccgccatccaggaggccgccagcggtgtggccgaagactatgatttgcctacggacatggcgcagttgtgggtggccgaacaggtgagacaagtcgcggactcactggttgacagactcgcggaaaaggccgtctcgcgcggtgccagcaagtcgaatgtggcccgtgccgccggggctagtccagccaatgcaatgcgccggttcccccgcctcaaagacgattcggcccagactcgcctgctcatcgacgacgtcctcgatactctcgaataacctccctctgacgagggaggtggctcgacgaagtcgagacggaggcagagatatcctacgctggccgccaaaaagcgcgtgaaaagccgtcttcagtcgcttcaaggcggtagtctgaacaatgttcgagtaatttagaaggagaatcaaggtgagcaatgcctttgcgaccttgccggtcatggcgggcgatgacgtcccggccggccccgtcgacccgattttcaaccgtctgctcaaagaccgcatcatctggatgggtgaagaggtcaaggacgatatggccaaccgcatctgcgcccagctgctgatgctggccgccgaagacccgaagaaggatatctggctgtacatcaattcgccgggcggctccatcaccgccggtatggccatctacgacaccatgcagctcatcgagcccgacgtggcgaccgtgggtctgggcatgtgcgcctccatgggccagttcctgctgagttccggcaccaagggcaagcgttacctgacctcgcacgcccgtgtgctcatgcaccagccctccggcggcattggcggcaccgccaccgacgtgcgcatcaacgccgagctcatcatggacatgaagaagaccatgagcgagctgaccgccgaacagaccggccataccgtcgaggaaatctaccgcgacaacgaatatgatcactggttcaccgctcaggaagccctcgattatggcttcgtggataagctcgtgaccacgccggacaccatcggcaacaaccagcagggggagtgagacttatggcaagtgaagaagcaaagtttgccgcccgcgccgaccgactggccggccgccagggtgtagccggcttcatgccggccgcggccccaaccaaccgctacatcatgccgcagtttgtggagaagaccccgtacggcatgaagacccaggacgcctactcccgcctgttcgaggatcgcatcatcttcctcggcgtgcaggtggatgacgcctccgccgacgatgtgatggcccagctgctggtcttggaatcccaggatccaaaccgcgatgtgatgatgtacatcaactcgcccggcggttcgatgacggccatgaccgccatctacgacaccatgcagtacatcaagcccgatgtgcagaccgtatgcctcggtcaggccgcctccgcagcggcgattctgctggcttccggcaccaagggcaagcgtctgatgctgccgaacgcccgtgtgctcatccatcagccggccatcgaccagggcttcggcaaggccacggagattgaaatccaggccaaggaaatgctccgcatgcgcgaatggctggaggaaaccctcgccaagcacaccggtcaggacgtggagaagattcgccgcgacatcgaggtggacaccttcctgaccgccgacgaagccaaggattacggcatcgtggacgaagtgttggctcaccgccagtaacggtctcaaacatgtggacgaatagtgatattcgtccagacactaggcattgcaataccctcggtcggtctgaccgggggtattgtgttgaaaggcgacggcaatgtgtgcgtcatgcaaacatacagacaagcacagcaggcagtgcggtattcatcgacaaaggagatctcatggggcgtgtggtgagctacaacgaggacattccccactgcacgttctgcggcaaaaccgagcgtcaggttcgcaaactggtggccggtcccaatgcctccatctgcgacgaatgcattgccctatgcgtggatatcatctccgaggagcgtagcaaagacgccgaagtcaactcgctgagcctgcccaaaccaacgcagattttcgattatctcaatcgatatgtcatcggccaggaagaagccaaacgagcgctttccgtggccgtgtacaaccattacaagcgcgtcaatatggagttgcaggaatccgccgaacaacttgacggcgcgaacggcaatgccgcgctccaatcagccgggcgagcccgcaagtctcagcgggccaatgatccgctatcggatgtggaagtcgccaagtcgaacattctgttgctggggcccaccggtgtgggcaaaacctatcttgcccagtcactggcccgtgtgatgaacgtgccgttcgtcatcaccgatgccaccacgctcaccgaagccggctacgtgggcgatgacgtggagaccgtgctccagcgtctgctgcaggccgcggacggcgatgtcagccgagcccagcacggcattatctatattgacgaaatcgataaaatcgcccgcaaatccggcgagaacacctcgattacccgtgacgtatccggtgagggagtgcagcaggcactattgaaaatccttgaaggcactattgcttccgtgccactggaaggcactcgcaagcacaaagagcaggacacagtgcagatggatacgtgtggcatcctgttcatctgtggcggcgcattcgtaggattgacggacatcgtgcgcaagcgtctgggccgccgggaaaccggttttggagccaattggcatgacgccgacctgaaagacgaggagctgcttaagcaggtcaatgccgatgatttagccgaattcggtctgctgcctgaattcatcggtcgactgccggtcaccagcgtgctcaaggagctgacggtggatgatttgacggagattcttacgcagccggccaatgcgctgattaagcagtaccgcaaactgtttgccgtcgacggcgttgatctggagttcaccgaccaggccgtccaagcgattgccgatacggctatcaatcaggggattggcgcgcgaggtctgcgttcgattatcgaacgcaccctgcaagacacgatgttccagctgcccagtcttgaggatgtcaagcaggtggttgtcgacaaggcatccgtggaaggcaccggtgcgccgaaactgctgcgtgaaacggtcatccaggaatccgcggagcgtcgtcgtacggcatgattgtcggatactgtgactcgctgttcctgtgacacgccgagtagccaatgagttgcacaaacacgaaccttgagtaatatgtatcgagttgtctgaaagacaatatgcgccagtagcccagcggattagagcagctgactacggatcagcaggtcgcaggttcgaatcctgtctggcgcactcccgaaccacggggacaacggtggtatgcgccagtagcccagcggattagagcagctgactacggatcagcaggtcgcaggttcgaatcctgtctggcgcacgataaagcctcggaagcgaaatgctttcgaggcttttccaattctcgttacatacctcctttacgatgggtcaggtttgttttcgtcggtagtgaagaaggagaaacagtggttctggcacagcatgccccttacgatttcgatacgattcttgagcgtcatggctcttcgtccgccaaatggcatgaggtcgtggaacagatgggcgaggacggcaaagatgtggtgcccttgtccgtggcagacatggaattcaaaccggctcctgaaatagtcgaggctctcgtccaatctgccacccatgacgtattcggttacgattacgccactgaggactactttgcagcttttctcaattggatggagcatcgtcataatttccatatcgacccttcgtgggtgagcctgtccgacggcgtgatgcctgccatcaacacggccctgcgatccgtcacccgaccgggagacaaggtcattatccagcggcctgtttattacccgttcacctttgccgccgagcacaatggtttgaccattctcgacaacgagctggtgctggacgagaacggccactatggcattgattttgatgatctcgaatccaaggccgccgattctcgctgcacggccatgattctgtgcaatccgcacaacccggtgggccgtgtctggacgcctgaagaactgcggcgcattggcgatatctgtatcaaacgccgtgtgcgtctgctgtgcgacgagattcacgccgacttttcctatcctggacataaggtcaccatgttctccacgttgggggctgagtacgcgaatatcgtctttgaattcaccgcgcctaccaaaaccttcaatctggctggtctgttgtgctccaacaccatcatcccgaacccgcatctcaagcgtcgttacgatgtggcggcggataatatcggcggcctgaccgtcagccatttcggtatggtcgcatgccaagccgcctacaaccatgccgaaccgtggctggacgaactgatggaagtgctggaacgcaatctcgggctcatccgcgacttcactgcacgtgtaagcggcattcgtctgattgaaccggaaggcacttacttggcttggctcgattgccgaggcctgggcttcgatactcctgaagaactttgcgattttatgcgcaatgaggcccgtgtgtggtttgatgaaggctcgatgttcggcgaatccggaaacttcttcgagcgtgtcaaccttgcctgtccgaccaggctgcttgaacaggtgcttgccaacatcgagaccgctttggctgaccgccagtagggggtacgccccgggctgaacgtcctgagatattccgtaccatagcagcagatcattcatcatcgagcgaggagacgcgatggccacaaccaccggcgcaaaacgaggcatttggcccatgatcaggcggatagccgcctctgatcgcatatctggactgattatgctcggttttgcccttgccggtctggttctggcgaatcttcccctcaccgcgcatgcatttgaggccgtagcggaaacgcatgtgttcattccgcataccaatcttgatctgccgatcggccattgggctcaggacggtttgctcactatcttcttcctgactgttggcctcgaactgaagcaggagctcaccaccggctcgctcgctaatcccaaggcggccgccgtgccgatgctgtgtgccgttgggggcatgatcaccccgcccatcctgtttctggccaccactgcactgttttcgcagttcggcccgggggagcctggctcattgatcctgaccaccactggcagcagcatcccgttcgccgagatgtcccacggctgggcggtgcccacagccacggatatcgcgttctcgttggcggtgctcgcactgtttgccaaggcgctgcccggttcgatccgcgcattcctgatgactttggccacggtcgacgatttgctggccatcatcctgatagcggtgttcttttcctcggtcaatgcctggtactggttcattggcatcgccgtgtgtgccgcggtatgggcacatttggttcgtcttaagaaagtgccatggatcgcggtgggcgtggtcggcatccttgcctggatcatgatgtttgaagccggcatccatcccacgttggccggtgtattggttggtttgctgaccccggcacgtgtgatgcacggtgaacactcgccgcgcgccgaacgatatgcggacaagctcaagccgttttccgctctgctggctttgccgattttcgcattgttcgccaccggcgtgcattttgaatccataagtccgctgttgctgctctcgccactggtcatcgccctgattgtggcgctggtggtcggcaagccgttgggcatcatcgtcaccgcttggctggccacacatgtcggagggctcaagatggccaagggactacgcgttcgcgatatgattcccgctgccgtcgcctgtggaatcggttttacggtgtcgttcctcatcgcctctctggcctatacgaaccaggagctgtccgccgaagcccgattcggtgtgctggtggcctcgctgatcgccgccgcgatttccggcgtattgttgagccgccaatccaagcgatttgaacaggctgcggccgttgcagctgctgaggctggcgccgagtccgacgccaatacgcattccgacgagctggcggagcatcccatcacccttgcggacggcacggaaagcgttgaaatcgacttccgtcgttaatctgcctaggatactgctagagcctatggaggtaccaaatggcgaagaagcggaaaaaatcccaaaaggccgatggcaaaaaagcatccggtataaagcagccgacaaacaccggtgttgacgggaacccgaacgtcggaacaattgccgaagaacaagccaacattcaagtcgcacagattccggtgaatccggttgattcggaggacgcctcgccgctggggggcacctatcatcgaggcccggtgattctgcgcggtcagatgattccttcggacaacaccaccgcgaacctgctcaagccggatcaggataccgattggctgcatatggatccgtggcgtgtgctgcgcatccaatccgaattcgtggatggcttcggtgcgcttgccgagctgggacctgcggtatcgattttcggctccgcgcgcacacaacgcaccgaatcggactacaaggcggctcgtcgcatgggcagccagatcgccaagcgcaatatcgccgtcatcactggtggcgggccgggcattatggaagccgcgaacaggggagcggcattggcgggcggcaagtcggtggggcttggcatcgaacttccgtttgaacaggggctgaaccagtgggtgaaccttggcatgagcttccggtacttctttgtcaggaagacgatgttcgtcaagtattcctccggtgtgatcgtctgcccaggcggcttcggcacgttggacgagatgttcgagctgttgaccctggttcagacccacaaggtggcgaacgttccggtggtgttgtacggcaaagattattggcaggggctattcgactggttggatgggccggtcgccgagcgtggcatgatttcgaagatagatcccaagctggttaccgtgactgacgatgccgacgaagccgtggacgtggccacgagtatggttgcctgagagcatttggctcccctccgtcgaggaaagccaagaaatattacttcttgtacgcgatgagcagtccggtaccatccggagtaagtgtggattcaaattcctcatcctgctcgacggtagtgatgagctcgcgcatggccgtggccttgccgttgcggtcggccgggttgatcacaccgccctgctccgtattcaaagccaatgcgtccgtgaatacgatggcaccatgatcacgtagcaggcgggacgcctgggcgaatgtggcggcataattctccgcatcgccggccaccacaatcaaatcgtaatcattggcattgagcctgggcagaaacacactggccggagcattcaccgcacgaagcgtggtagcggtctcgtcctgcagttcggcaaacgccttgcgaatcagtgtgatgccctgtgcggtggaatcgacggcggtcaactgtcccttgttgtccaaggcataggcgagttgcagagtctccaccaaggagccggtgcccacggcgattaccgaggaggctccggtcaaacggaccagcaggcccaggagtcgggcttgtgcggctggaccttgcagttgtccggattcgtcggcggcggtacgggcatcagccagtgtgaacggttcaagttcgcgagcatgttcttcggtgaattcccatgccttggcgagattcgtgtactgtgttctgtccataaccgttccttcgatattcgttctctcagactatgactttccggtatctacccggcaatgattcagcgctcgcggactttggccacgatctgccacatttcctcgcccacatcgataccgcgcgggcagtggcgggagcaggcacgcaccgattggcatccggccacaccgtcagcggtatcaatggcatccatgcgatccatggccttggtatcacgtgaatcgttgatgaagcgggaagcccagatcaatgcggccgggccaacgaatgcatcgccgccggcgtataccgggcaggcaccctcgcacacaccgcaggcgatgcaattgctcagcgtctcatacttggcgagctgctcggggttctgcaggtattcgaaaacgtccattttgccttcggcggtggtggcaagcacgccatcagcctgaagatacggggtgagtttacgaatctggttgagcatcgggtcgatgtcggcgatgagatcacgttgcggcgggaatccaggcaaggaagccagttcgataacacccagagaaccttcagtgatgttgttttcgacgttttcggcgggaacgtcgggttcgttagcggtttcgtcgccggtgcgtcggaatccctcatcatcgacttccggagctgtactaggctgcttggcccagtcgcggacggtggccgtacacagcagagtgggtgtgccgttgatggctgcggcatcagagccgcacatgccgtgaccgcatgaatagcggaaggccagcgtcgggtcgatggtgcgtttaatggtcagcagacagtcgagcacggtgtccgatggacgcgcgggaatggtgtattcctgcacccactgcttgccgcgcgggcggcggcgtgccgctgaatccgagccgccaccgaacggggagcttttcttggcgaacgggctgccgccgcgtgcacgttcggcgcgctcggggcgcggcgtgaaacgatgcacctgcagggtaaccgtcgtgttgttcgcctcaaccatgttctgcctccagaaaccgtggatatcagtccgattattcgacaatctattgtgtcacaagccctgggcggcttagtattcacgcttcttgggcgggtagtcggtgatatgcaccggcttgaagctcaccgggccggcatcggcgaccaacgagtgagcgaggaaatgctcatcatcgcgttcggggaaatcaagacgctgcagggacccacgagattcctgacgagactcggaagcgtgcaacatggcctcggccagctcaatcaaatgccggacctcccagatggcggtgacctcttggttgaaggcggcggttttgtcatgtgcccgtaagatatcggaaaccggcttgatgtcgctgttgagctgggccagagccgtatcgatggtctgagcggtgcagcgtacagccagagcctgttccatcactgatccaagttgggccatgagctgataaggattggccgtggaaccctcatcgacatcatcggcttggccggcgagcagctcgtcaagttcggacttacgggattcggcggcatgatcggcggccgtcgtcaacatgtcatcggccgaatcatcggccatgggggagtcgaccggattctcggcgatacgcgtggccatggttttgccggcgcgcgtgccgaacagacatgcgtcaagcagcgaattgccgcccaagcgattcgcgccgtgtacggaaacgcaggagcattcgccagcggcgaacaagccatcgacgatttgcacggcatcgtccgtccaacggtacacctcgccattggtggtgatggggatgccgcccatcgtgtagtgcgcggtgggcttgatgggcaccaggtctttggccggatcgaggttcgcgtactgttcgatggtttcgaccacctgcggcagcacttccttcatacgttcagggtcgatgccggtcatatccagccagacgcagtccttcggaccatccggatccttcgggtcggcaacgccgcggccggcgtcgatctccgccatgatggagcgggagaccacgtcgcgcgcggccagatccttatgctctggagcataacgttccatgaacggctcgccgtcggcattgcgcaggatgccgccctcggcgcgtgccgcttcggaaagcaagatgccggtgtgtgcgagaccggtggggtggaactgcacgaattcgatgtcttcaagctgcaggccggcagctagggtcagcgccatgccgtcgccggtcaagtcccaagagttcgacgtggtgtggaacagtcggcccgcgcctccggtggccagcagcacattgcgcgcgtgaatggcctgaatcttgcccgtatgcgtatcaaaagccacaataccggccgcctgcttgccatcatcggcgagcaccagatcggtcacataccattcctcggcaaactcaacgccggcggccacacactgctgccacaaggcatgcaaaatctggtggccgatacggtcggccgcataggcggcgcgcttgaccggggctccaccgaactcgcgcgtatggccgccgaatcggcgctgtgcgatatgcccgtcctcggtacgggagaaggccacgccctgacgctccagattgattacggtctgcggcgcatactcggcgagcagcttggccgcgtcctgatcaacaagccagtcgccgcccttgatggtgtcgtagtaatgccaatgccagtcatcggactccacattgcccaggcttgcggcaatgcctccttcagccgaaccggtgtgcgaacgcagcggctgtagtttggagaccacaaggatcttcgggtccacgccttgttccttgagttcggcgatttcgggggatcgcagcagtcccaatgccgccgacaaaccagccgcaccggcaccgacgatcactgcatcatacatatcttccaaacgtttcggactcatggattcgattcttgcacacccgccgaacagcgccgtcatcgtgtcatgagggtgctgacaattcttgttctagcagtgtgtaagactggcgtctccatcattcagatgaggcgacaactgagcgtgaccgttccggtctcccggtgaatcgctcctcgcagttccagcgctccgagcagttccagtacggtggcgatatccggtatttcctcgaggtcgttatttctggccgagagcagcagggtgtccggtgtgatggcgaggcgatgcgtacggcattcgcggataaggccgaccatcaagcgttccgcttccggcaatgtgctgacctgtatcgtctgttgcgcttccgcatcgggctgcaacgatgcctgggcgcgcaaatctggcatgtggtgggatgaggagaaatccttggagtctgtgcgagacggcaagggagtcgtgatgacagcctgggatagcgtgggctgctcggatttcttgtggaccgccttggtcgtacacgaaggcgctggatcactggcatcgcgctgtgcgttgtccgccatgcctggacatcgttccataatcggctgatggcgcttgtgacagatgtctttcgtggaggtggcggcgcatagaatcgtggcctgatggtcgccaatcattttgttgcagccggcattgcatggctgattgatgtctcctggcactgcatacacctcgcgcatcagctcgcaggcccagcccgcagtattcagtgcgcctgagcgcaatctcgcctgtgccacaaccagtgtggaagacaatgccgcgataatacggttgcgcagcaggaatctgcgcgcctcgggaatggtgccgggacaaagttcgctgatgagtgcgcctccctgcgattcgatgcgttcaaacagtgtgcgattgcgagctggccccatatggttcagtccgccggcgaatacggcgacggttctgcccacgcatcctggtttgcggccgtgcagagcgttcagagcaccccaatgagcggccgcgtccgtgcccatcgcgcctcctgaaactaccagatgaccatccaccgcggcttgctcggcaaccgtatgggccacataccgtccgtactcgttgacgtctcgggagccgacaatacccaccggttttgcgcagctggtcagggcccgcggatcgcctttgacccaaaggcataagggaggtgcccagtcggagcgggtggataggtcggtcaattgcgcaggccagcatgggtgtcccgggccgataatccattgtgtgccatccatagtgaaccagtcggccaaggaaacgatgtcttgcgagggcagggcgtccatccgctgatgccagccggacagggcattgcgaaaagcgttcatcgcgctgggtgtgggtttgcgaccccagcgggtcagaccattgatgaacatgcgatcaatgcaggtcagtgctttttggcgaacatcggaaggccggtcagggtgacattgtgacaagacctgccataatgcctcagcatgttcgcctcctttgagtgtggcgtacatcatcgcatccgcgccatcgatacagaacgtgagcgcggcacggtatagggcatctagtgaaggagcggcgataatacgtgagcgcacggtctgtgcggccgtttcggcttttccgattgtgtgaggggagccgtgaactgaagcgggctcggcaatcatattggtggtactcatgacactctcgttctcatttcgataccttgatggacatcctgttcggtaggggaaatccgaccggccagatcggcgagggtccaggccaatcgcatggcgcgatcagctccacgcaacgtcagctgctgcgaggacaaggcacgattgaccagttccatcgccttgagcgaggtgttcgcatgcaaccacgtgccggatgcctgagcattacatgtccacccgaattgctggaacctatctttggcggcgtttcttgcacgaatcacgcgtgcacgaattgtggcgctggattcgccgagcggttcatgctgtacggtgatgcgggggacgggcggcactgtcatctgaatatctactcggtcaagtaccgggcccgataaacgggagaaatacctcatgcgatctttttcccgacacctgcagcgctcgccagtgccgtaataatatccgcatgggcaaggatttgccgccatgaccagctggaatgcagctgggtaatacgtgcttcctttggagcgggagagagccacatagccggattccaatggttcgcgcaacgtttgcaaggcccgggcgctgaactccggtgcttcgtccaaaaacagaatgccacggtgagcgcgggttatcgcgcccggtgctgcgatgccactgccgccgccgaccagtgatgctgtggaagcggtatgatgcggcgcttcaaacggaggcacatcggtgatgccatattgcgataaggtgccgcacagcgagcgaatcgaagcgacttccagctgttcggtatcttccaatgggcacatgatgccgggtaatcgtgaagccaacatggtttttcccgtgccgggaggtccggtcatgatgaggttatggcctccggcggccgccacctgcagcgcccatttggcatgttcctggcccaacacctcattcatgtctgcgtatccgttttcactgacttcggcttgctcggaggcacttgcatcctccgcgagctgcagatcggggattgtatatgaggcattgcctcccatgagctcgatgagctcgcccacatgtcttacgccgattgcatccatgtcttccaccatcgaagcctcgtcaagattgcgatagggaatgattacttttcggatgccgcgttcctgcgcatgcaacatgattggcagtaatccatggataggcagtaccgaaccgtcaagattcacttcgccaagcacaatagtgtcttccagacaatcgtggccaatggctccagctgcgcagagaacgctggcggcaatggccagatcatgtgatgagccgcgtttgggtagggaagcggggctcatattcacggtcacacgggtttgtggccatgagaagccactggcttgacatgccgatttcactcgctctcgcgcttcggacagtgaggtatctggcagtccaatgatgctgaaatatggcaggccgggactgatgaaagcctgtacctggacaatgaaggccttgagtccgatcagaccgaccgaaagggcgctgccaatggccatgcttgatcctttcgctaaaacgcattttcgatgtgatgcaccagtggtctacccacgcgcaacacgatggtgatgacatcgaatctgacggctttgtgcgagatacggttgcggcaatcaagcagccaatcgcaagcagctttcctgagattctgttgcttggacggcgtcacggcctcctgcgggcagccgtactggatggtgcggcgcgatttcacctcgacgaacaccacagtgtgctcgtcgttgagcatcacaagatccagttcgccgtatcgagtacgccagttatggctcagtgtggtccatcctttcttctccaaccaaacagccgcatatcgttcgccaagagcgccgaactgcttgggtgacaaattgcggtcgcccattgcggctgcgatgtgttccgtggaggttgctgcatcattcatgattccactgtgcgggttggtgatatcgggacgcaagggcgaccggcaaatgtggataccatgacgcggcttggcgtgttgtggacagcgtgtggatgaaagtgcggttatccaccattagttcagaaagtatgtgcttcgctatgtcatccagcggatgacattcgcgatcccgttacctatttgtaagtgcaacgtttgtctgtgggtggcttgtcttcgacattaccttgccgagtttgcggtaccaagcctcgttgggcgtttcccagtccgggaccttcatgggggtgtcgttgatctcctggacgatggcctgcaggtcctcgtccgtgaggtcgtcgagactggtcctcttgggcaggtagcggcggatgcgtccgtcttcagccgtttcggccggtaggggcggtaggactcgttctcgttggacgcgagccacgggccgcgcctcggttcgcggctgacggtgggcttgccgtggctgatcctcagggcgatctggcggaccccgagcccctcgcggttcctcaactcgtcgatccggatgcgttcctctgccgacaggtgggaataggctttcatatcgagcgcgacgctttctctctggttatgaacttgaacacttccaaccatagagcgggtgttgcgcttctatttagaactcagggtgtgggcacttgccggcatactgatatcaagcctgttactggtatgggtacggctggagaacgggaatgcagaggcaatggcgcttaccgacacgctgcttcgggtgccgataagcgtagtggttggtgtgctggttggggcgttagttgccgtactcggcacgcgggaaagccacctgctcaagtacttcaagaatcggtagattgggatgctcccgctagactgagggtggtgcgtgcagatagtagaccaccctcagtcaacttcgttgacagctcccgccagcgggagccaaagtgggtcacttcaccaaattggtgagttctccgagattgagctcgaagctgacgccgcgatcctcgaagtgaggttggttgcgcgtgctttccattgcatgacgcacgaactcgccggcaatctcagcagactcggccagtccgcgaccggccatcaccgcaccgcacagggcggaagcgaatgcatcgcccgtgccgtgaatcatgtacggcagcttgtcatgtgccagttcgatcttgccggtaacaccagtggaggcgctggccacatagttgatgatcttgccgtcgccatggtcgatgcccttcaacaccacgttcttcgcgccaagctccagcagcgcgcccaacagctcgtcaaccgtggcttcatcgatatcctgaccggggtagtcgcgcttggtcagaatgctcgcttcagtcaggttcggcatcagcacatcggcgccgtcggccagcgcacccatcgcctcgcacagttccggcgtatacgtgggatacatttcaccggcgtcgcccatcaccgggtcgaccaaacgtagtgcattcggatattcgcggtagagacgctgaataatcgccacctgatcgggggagcccaggaatcccgagtacacgccgtcaagctcaacgtcttccttctgccaggcatccagatagccggagaggatatccgtggtgtcatggaaggtgaacaccgcgtacttcgtgtgtgcggagaacagggcggtcggcaccgggcagacatcgcagccggctgccgaaagaatcggaatcgcggcggtcagcgagcacttgccatagccacacatgtcatgcacggcggccacgcgcgggatgtacttcggatcgcggtcgtacaacgtaacgtcggacactagaaaactccaatcaatcagacggatgtcacataatcacagttgacactagtctgtagggatacggacacgctaaccggtattcatctggtgaggttccgtcgccgaattcaacagatcgctcaaactcctagcgacagaaatcttggaaataaaaccatccaccccaaaaattccgttgctggttccatctgagcgacagaaatttcggaaatcatccctgatcccctgaattgctgtcgttgaatccgtctcagtgacagaaatttcgggaataaacccattcgtcctgaaattctgtcgctgacgtcacctcagtgacagaatttcaggaaattgaggatgatttcctggatttctgtcgcgaagagacgtggaagtgtctcggcgtgtcgtgagatttttgatgactattttgcccgacgtaaccgcctcatatcccaatgattccaagggtttataagggtctataggcaaccccgataacgctcagcttgcgacatgcaccttgagcgtcgtaacttcataaccaacacctcgccaaccgcccgaacacggcaggcgggtggcaaggaaaatatcctcgcgacctagcacaaccaaggagaataccatggccgagaacaacaagaagtaccgttttgagaccctgcagctgcatgtgggtcaggagcaggccgacccggccaccgactcccgcgcggtcccgatctacgccaccaccagctacgtcttccacaacttcgaccacgccgaggcccgtttcggcctcgctgacccgggcaacatctacggccgtctgaccaacaccacccagggcgtcttcgaggaccgcatcgccgcccttgaaggtggcaccgccggtctggccgtcgcttccggcgccgccgccgtcgaatacgccgtgcgcaacatcacccagtccggtgaccacatcgtcgccgccaagaacatctacggcggtaccttcaacctgctgcgccacaccctgccgcgcgacggcatcaccaccaccttcgtctccgccgagaacccgcaggagttcgaggacgccatccaggagaataccaagctcgtctacttcgagaccttcggcaacccgaacgccgacctgccggacttcgaagccatctccgaaatcgcccacaagcacaacctgccggtgattgtggacaacaccttcgccaccccgtacctgttccgcccgctggagcacggcgctgacgtcgtggtcgagtccgccaccaagttcatcggcggccacggcaccaccctcggcggtgtgatcgtcgaaggcggcaagttcgactggaacgccgttccgggcaagttcccgactctgaccgagcctgatccctcctatcacggcctgaacttctacgaggccctcggcggagccgcctttgtgacccgcgtccgcgccattctgctgcgcgacaccggcgccaccctgtctccgttcgctgccttcctgctgctgcagggcaccgagaccctgtccctgcgcgtcgagcgccacgttcagaacgcgctgaaggtcgtcgagtacctgcagaccgtgccggaagtcgagtccgtctcccacccgtccatcgagggccgtccggaccacgccctgtacgagaagtacttcccgaacggagccggctccatcttcaccttcgacatcaagggtggcaaggacgcggctcgcgtgttcatcgacaacctgcacctgttctccctgctggccaacgtggccgacgccaagtcgctggtcatccacccggcttccaccacccactcccaggagaccctggaagagctggaggaccagggcatccaccagggcaccatccgcctgtccatcggcaccgagaacatcgaggacatcctcgacgatctgaagggcggcttcgaagcccttcgcgcttccggcttggccaagtgagacggcaggaaggcgcgctgaggcaggaaggggagcggcgcttatggggtgcgccgcacaatgcaaaggcacatgggggaccttccgtccgataacttgactcaaggagtagaaagctcgcactgacgtcatgcagtgcgggctttcttgcgtctgcatgcctcacacgacatgaccgccgccataaagtatgtgaggcaaacgcacattatcacccaattgcacatgttgacaatccgcgatatttcgccgattgtcggatgccgttgtccgttttatattcggtcggcctcacactgtttgcgcagaggcatgaatagtgtgagacctgagacgacataatcctcaaggatgagggccggcacacggccactagcccaattcagtctggcgcacgatggggcgcgccgttatttcttcataagttggaatcatcgtccgggcataaggcccggccaaatatggagagacattatgaacgtgcagaacccgtccgcatcgcgcggcatcgctattcaggccatcgacttggtcaagaactacggcaccggcagcaatatggttcacgccctgcgcggcgtgaacgtgagtttcgaacgcggcaaattcaccgccatcatgggcccgtccggttccggcaaatccacgcttatgcacacgctcgccggcctcgactccgccacttccggccatatcctgttcggcggggcagacctgacccgtatgaacgacaagcagctcaccctgctacgccgccacaagatcggcttcatcttccaaagcttcaacctgttgcccatgttcaccgccgaacagaacatcctcatgccactgactctcgccggagacaagcccgaccgcgcctggttcgacctgctcgtcgaaaccctgggactgaagcagcgcctgaaccaccgaccgaatgaactgtccggtggccagcagcagcgcgtggccatcgcccgcgcgctgattaccaagccgaagctggtgttcgccgacgaaccgaccggcaacctcgactccgtttccagcgccgaagtgctcggtttcctgaagcgttcggtcaacgaactcggacagaccatcgtcatggtcacgcatgatgcggtggcagcctcctacgcggaccgtgccatcgtgttctccgacggacggatcgtggccgacgaacagcatcccaacgccgaagtcatgaacgaactgcttatggccgagcgagagcgcaccacccgcaccactcttaccgatactcctgctgaccagatggcacagatggcaggcgtgcgcaacgtgccggatctgcccatcaccgatgcgccgctgccgccggccgttcccacctctgggtgtgagggaacgctgcgccacgcccgtgccgccgcacgccacgcccgctgacccacgggaagcaagagagtaggacgaacccatgttttccatcacagtgaaactcatgaagaaaagcgccagaatgctgattccggccggcatcgccatcctgatcggcaccgcgttcattgcggccacattcctgttcggtaacgccatgaacgattccctggcccgtcagaccaccgcgcagcttggcggcgcgaactatgtgatcagcgtggactccagcgagagcctgaacgagcaggagcggaatggcatctacactcgcacggtgaacgacttccaactcgaccgtatccgcgccacagaaggtgtcaaggatgtgcgcgtcgaatcctcgagttctgtaaccgtggccaatggcgacaagcatgccagcagctatgccatcaccaccgccgcacagcgtgatctgctaccggtcagcatcattcaaggcgaccagccggtcgatagcaacgaaatagcattgaccaagtccgtggccgatcagcttggtgtcaaggtgggggatagcgtgaccgtgaactcccgtaccgcgcaggccgtagcttcgacgggctacggttccgccggcaacgacactgccgctgattccggtatgactgttcgcgtagtgggtatcaccgaagacccgaacggcgcctatgcgtactacggcggagcctcagtgctttccgataacgtgatcaccgcgatgaacggtatcgacgatttcggcaaactcaatgtctatcttgtctacctcgatatcgacgatgccgatcagccgtccgccgacgccaccgtgaaacaaatcgacaagctgctgccaaaacatttcaccgtgcaatcccgcgcagcgatggaagaggaatccatcaaatccgtgagcaagggcgatacgagtatcaccaccatcttcctgctgagcttcggcatcctcgccatgctggtcgcggcgctcgtcatcgccaacactttccaagtgctcgtcgcccaacgccgtcgcacgcttgccttgctgcgcaccatcggcgcgaacaaaggccagctgtatgtctccgtactgttcgaggccggtctgctgggactcatcgcctccatgctgggcgtgggcctcggcatcggactgatggcggcgctgtgccaatccggcctgatgaaagccaccggcatgaccatgagattggtgctgtcctggccggcattcgtggtgccgattgcgttcggcatcgctatgaccgtgatcgcctcgcttggctccgcacgttccgccaccgccgtgactccactggaagcgctgcggcccatcgaactgaacgatacccgtcgggccggtaagatccgtgccatacttgcgggtctgttggtgctcgtcggcatcggtctggccgcattctccgcctggcagatgaacgaaaagatcgccggacatgattcgctggccgacaagcagtatccgatggtgctgctcgccgccatcgccggctgcgcgctgatcttcctcggactggtgctttccgccacattctggctgccggtattgatgcgcggtgtgggcgcgctggttgcgtttgccgggccgtccgccaaggtggcgcatgcgaacatccagaagaatccgcgccgcgtggccgccaccggtgccgcactgcttatcggcgtgacgctggtctccaccatcgccaccggtgccgccagcgccaagcaaaccatgaacgaggcgctgaccacgcgctacagcgtcgacatgatcgcggccggtgctgatatgaccagcaaacaggccgatgaggtcgccaagattaagggcattaaggatagtatctacgcgccgactcgcatgatgagcatgaaggatgccaatggcaaggatctgaacgtactcatcgttggcgtggatggtgttgacgcgctgcgcaaagtggtgcgtgccgacctgtccggcgtgaccatcagcggtgactccgtacttatgcccaagtattccgctgccacgggcaaggacattccgctaggtaagagcgtcaccttcaccagtgatgtatccggctcgcagactggtacagctgatgctgccgcgagtgatactgagaacgatggcggacaatccgatggcgtgcagacactgaccctcgcgccgcagaaggtggattatcgtcgcatctcagccaactatgccgcagtcgccttcgtggatgccggtcacttcaccaacggtgatgtaaaagcgaacggacatatcatgcttatgcgtatcgacgccgaaagcgcgggcaccacgctgaacgacgtattcaccaacgtgcagaatgcattctccgccagtgcagacattgacgtgtctggtccggtggccgcacgcacgcagtgggagaccatgatcaacggcatgatggcgttgcttgtcggcttgattgcggtggctgtgcttatcgcactggtcggtgtggcgaacacgctgagtctatcggtgatcgaacgcacccgcgaatccgccaccctgcgtgccatcggtatgacgcgcggccagctgcggtgttcgctggccgtggaggctttactgctgtcgctcgtctccggcgtggtgggtgtggcgctgggcaccctgttcggctggcttgggtcctatatggtgttcagcctgtatggtgacactgtgttcccgttcgagtggaccaccaatggtgcagtgcttggcgtggcggcgcttgccgcgctgctcgccagtgttgcccccgcccgcagagccgtcaagacgccgcccgtcgaggctttggctgaggcctagtggcccggtcatagtctaagagcgaagagataggtctattcgtatgctgcgaatagacctatctgccttgaaagaggtacattcgttcctttgcggaaagctatctgctttcaaaggggtaccggatatacgaaaacgcgagtacaaccgttggaattgcaatgatcgtactcgtgttatcaggtctcggatatctctctgaaagcagatagctttctgcagaaaggcgaatgtacctctttcgaggcggataccacttgttctgccgtatcgtgtgtattggggaggtcacaccaacccgttatcgtacgcaaagaccacagcctggacgcggtctcgggcgttgattttggccagaatatgcgccacatgggttttgaccgtgggcaaggagatgaagagcttgtccgcgatctcctgattgctcaggccatgggcgatttccaccagcacctcacgttcgcgatctgtgagcagttccagctcgggatcggtatatgtggggcgtgcggtgccaatgccgttcgtcgaatcggcacccgtagctccgaccgttccagtagtgtcggcgacgctgccagcattgccattgaaacttgcgttcgaaacgccgccactcaacgacccatgctgcgcatagccgtcttgcatcattttctcgatcagacgcttggtggccgaaggcgcgatgatcgcattgccctggaacacggtgcgaatcgaattgagcagcgtctccggttcggtgtctttgagcagaaaacccgaagcgccggcattgatggcggccatcacatattcatccaaatcgaatgtggtcaggatgatcacacgggtcggctgcgtgccatccgtgccggcggtcagcgaagtaatacggcgggtggcttcgatgccatccatgcccggcatgcgcacgtccatcaacaccacatcggggtgcagggtctccgccatcgtcacggcctcggcgccatcgggcgcctgagcgaccacttccatatcttgctgcgagccgattaccatggcgaagccggccctcaccagctcctggtcgtccgcaatgatcacgcgaatgcttctgctctcgttcatgctctccactgtatccgattcctattcgagtgccgctccatggacaccctgattgttccctgagttcatgttcgtggacgaatccgtctgagatgtggattccgcctgcctcatctggctggacagaggagcagccggtcgcagttgcatgtcgggttgtgcgccttcatgcatctcgtcgctgaatccggtttcacgcagcaccgtcagcaattgccgcatgtgcgccagagccgcacgcccgcgttccccgatgaccgtgaacgcggcgatgatctgctcgctatcgggagccggttcggagttcagcatggccagcccatcatcggcttgcgtgatcaccgattccaacgtattcaatacctcggcctgcatggccgtgccgatgcgattgcgctccagattggcggccagcaccttctgccgctcctgctcggccttgagcgcctcctcgcgttgcatgagcaccagtgcgttcgagccgcgtgaacggctccaccgggccatcgcaatgcacgcaaagccaaacagcatcaccacgccacccggtatcaggccggaaagcaccagtagccagcgggacatcgccgattcgccgttgaggggcagcagcatctgaatcagcatgtcatatccgttccagccggacattgccttgatgccggccagccacgaatccgcgaccagcgccacactgacccatttccatgcctgttcccgtccatacagtgcggcggcgtgtacggacaccaatgcaaacatgttgacggtcaggatggatggcagaaacagcagctgcacggcggacagaatcgccatgaccagtgcgctgccctccgggaaccgacgtcggaaagccagaggggcaagcatgatgatggtcagtgccatggtcagcacagtgttgggttgaactgggtcattgctgaccgtcatcatctgcagctcgttgcgtgtcgcggaactgaacatcgcgatcagcgccacggtgatgagaatatccgccagcagataatgccgttcggtccattgtgcgaagcgggccacccaattcgactcaccgatatctccctggttgagcggtttggagcgtatcgaatccaggagtttccgtagtcgtgtgatggtgacgggcaaagcgtcagacggctcggcgtcggtttgcgcgatttcgggggagaggggaatcgtagccgccacgatgaacccgccgttcggtccagggccggcatggatgctgccgcccaacgattcgatgcgctcgtgcatgcccatcagaccatagccgggtgcgtgcccgtcggcggcggatgccgctccctggccgttgtcggacacggtaatcgcaagcccgtcatccgaccacacctcatcgatggtggccttcgcgccctcgcccgcatgcttgcgcgtattggtcagcgcctcctgtaccaagcggaacacggcggcatccgcatcggaggtcaaacgatccggccgtgacttgcctgtcacacgccgggatacgaccagatgaccgtcgaacagagaatcgatgtccgcatacccggcatcatcatccgtgccgaacacgccgaacagtcgctgcatatcatgctgcgcgcgttccgcttcatggcgaatcgtgctcatcgtatgcttggcgacggccagatcatgcgtgcccgcatatcggccgccatccgactgcacgataatcgtcgacagcgtatgggccaccacatcatgcatatcacgggcaatgcgcgcgcgttcggccagcgccgcgatatgtgtctcctccgcttcgcgggccactatggaagcattgcgttcgcgcatggccgtgagcgtggccttgcgcgcacgctgccataacgccatgatgataatgctcagcacgctgatttccatgcacagcgccagcacgcccgtatcccgcagcattttgattccgcagttggatacgctcggctcgctgatgagaccgggagaggccgggcatatgggcatggtcgcagcggtgggcagccagctgatccaggcggtccaagcattggaggaaccgcttttgaacagcgggccgacgttcattgacaccgcccagaccgcagccgcggccaatcccatggcaaaggcggtgataatgaatcgcaaggaatgcttgggattgccgtacacgagcaccgaatacaggatgataagcgtgtagaagtcgccgtaggtcatcgacgggccgaagacgagatgggcggcggtcagagccacgaacaaccaagcggcgatctccggctggtatcgtcgcagcatcagcggaacaaacgtcggtagcgaccagaacaacaatgaataattgttcgatacgaataatagtccaggagtcgaagaggaactggtggaactgatgagcgggatgagtccgaatgtcagtactgcggcgagcagggtgtcccatagcagggtgtgactcggcttccgagcgaaccatgccctcacgtgcgcgaccatttccatacgtcccaaggctagcgtgtccgttaacaagccgacatcacccttcagacggatttgtgggctagagtttgagccatgacattgctgagcaaatactatgtaccgggcctcgccatcgaggaccattccattgacgttcctctcgcttggtccggccatgagccaggccaagcattcgacggcgaaaccatcaaactgttctaccgtgtggtcaccacgcccgaacacgtgcacgatgacctgccgctgctgatcttcctgcagggaggtcccggcggtgagggcccgcgtctgaacagtcccacctccgatggctggattgaagaggccaccaagcattttcgtgtgattctgcccgaccagcgtggtgctggtcgttcttcgcgcgtggacacgcacaccatggcccgtattgccgccgcccatgaaggtgatgtcgcagccggcgctcgcgcccaggccgattacctgaagaagttcctcgccgattccatcgtgcgtgacttcgagcatctgcgtttgaccgagttcggcgggcgcaagtgggtgacaatgggccaaagctatggcggcttcctgaccctgaccacgctgtccctgttcccggccggtgtgatcgccagcttcaccaccggcggcattccgcacgtgcccgcctgcgccaccgaggtctatgagcacaccttcccgcgtgtgattcgcaagaccgcccagttctacgagcgttatccgcaggacaaggagcgtgtggcggccattgtggagaagctgccgaccgccgcggaagtctccgagttcgtgggcaagctgaccgattccgtactgaacccgatggcgggaaccgaagtcgaacatcgtctcggcgtgatcgccggcatggcggcccacggtttcccgatcatgcccaacggcgacccgctcaccgtggaacgtctgcagtgccttggctccgacttcggtaagaagccgagtttcgagcgagtgcattggatcctcgacagcgccttcctcgatggcgacggctccgtttccgccgcatcgccgttgtccgacgaattcctgaccagggtgatgaacgccacctcatcgcgtccgctgtactggccgttgcaggaattcatctacgccaacggcgagatggaccagccgattcgctgggccgcccagcgtgtgcgcgacggcaagtccgagttcggtgccgatgtgcgcccgctcaatttcaccggtgaggccatgttcccgtggatgttcgagcaggaggccgcgctgcgcccgttcaagcccgccatggacctgctgatggaagacacgagcttcggcgtgatctacgacgaggaccagctggcacgcaacgaagtgccgctgcaggccggtgtctacttcgacgacatgtacgtcgactcaggcatgcaactcgacacattgagccgcgtgggcaacagccattattggaccaccaacgagttcgagcacgacggactgcacggttcggtggtgttcaagcacctctacgacgaagccctcaaccgaggcgacctcgaagaactgttctaacctctttggctcccctcttggaggggagctggctcgcggagcgagactgaggggagtatgtcaagtgcggaaacatccctcagtcagctccgctgacagccccttagagagaggggagcccaagtacggacgaaaggaaatcttatgacccggaatctcaccattggattcatcggatacggcaacatggctcaggccatcgcccgaggccttgtcgacgcgggcgtggtcaccggcggccagatggtcgcttgcgccgcccgctatgacaaactcgagaagaccactgccgagctcggcgtgcgcccgttgcacaatccgctggaagtggtggtggccgccgacgtggtcatcatcgccatcaagccttatcagattgacgccgtcgttaagccgctcgccagcgaactcgccaagcctggcaaaatcgtcgtctccattgcggccggctggaatctcaagaaatatcaggatctgttcaccaccgaagacggcgaatccgtcgactctccggacatccacattcaatgcacgattccgaatacgccgatggctgtgggcgagggcgtgctcgtcaccgaatccgtcaacaccctgaccgatgaggagaccgagactttcgagcaggtgttcgcgcccatcagcctcattgagcgcgtggataccgcacacatgaacatcgccatggtggtggccggctgcgcgcccgcattcaccgacatgtacattgaggcactgggcgatgccggtgtgcagtacggtctgcaacgcgctaccgcctaccgcttggcggccaagatggtcgagggcgtcggagcgctgtacatggccaccgaaacccaccctggtgccatgaaggatgctgtctgctcgcctggcggcaccactatcaagggcgtcgcccagctcgaaaaagacggcttccgtggcgcggtcattgacgccgtcgacgccatcgtcggctgactgcactcggcaaaaaaattgcccccgccggcgggggctgtcggcggaagccgactgggggtctcccgaatcacaggaccacccccagtcatgcttcgcatgatagcccccgccagcgggagcagtatgaagcagacgaaactactcgatgatcacgtcttccggcttgatgtcggaggtgaagctcggggcgagctcgctctggtaggcgtccttgaagaagccgttggaggtcagggtcttgatctccttgttggtccattcgagcaggctcttgttgcccttcttcacggccggggcgatggtggactcgtcaccgatggtcttgatacccacggtgtagcccgggttgtccttggcccacgcgtacaggtaggtgttgtcgtcggcgagggcggccacacggccatccttgaaggcctggaactgctgggtcttggaatcgaacttctgcagctgaacatccgggtacttctcagtgaagaaggcctcggcggtcgtgcccttggtcacggccagctgcttgcccttgagctgatcggcgctggtgatcttggcgctgtcgggggagaccacgccgatggacaccttcatgtacggatcggcgaagtcgaccacctgcttgcgctcgtcggtcacggtgaagttggccagcaccaggtcgaccttgtcggacttcagcgagtccacacggccatcggcgttcacctgcacccagtcgactttgacgccaaggtccttaccgatctggttgccgagcgccacgtcatagccggcgcgggtgccgtcgttcttcacatagccgtagggcggcaggtcgccgaaggtggcgatacgaatcttgccggtcttcttgatctgctcgacggtctggccctgctgagaggaggagccgccggcggccggatccgggccattgccgcaagccgcgacggaaattagcgtgacgccggcgagcacaccggccaaagctttcttgacattgaacataattctttcccctttatccttttcttgttggttattgcaaatcttgatgattcggcatgaacggagtactcatgcctcaccgccgaccggagccatgctctctaggaagttcctggcacggtcagtttcgggattcgtgaagaactcgtcgccgggctgacgttccaggatcacgccgttctccaggaacatcaccgtgtcggccacgcgccgggcgaactccatctcatgggtcaccacgatcatcgtcatatggcgcttggcgagacgaagcataagctccagcacctcacgcaccatttccggatcgagtgatgcggtgacttcgtcgaacagcatgagctcggggttcatcgcaagcgcacgcacaacggcgatgcgctgtttctggcctcctgacagttcgcgcgggtacgagttcttgtattcggtgagctgcacgtcggccagcagctgatccatctgcttggcgacctcggccttcgggcgcttctgcaccttggtggggcccagttcgatgttcttggccacggtcagattcggaaacagatcgtagctctggaacaccatgccgatttcggcacgcagcttgcgccaggtcttctcgctgttattcgcgatcttctggcccttgaaccagatttcaccgccctgaatggtctccaaaccgttcaggcaacgaatcagtgtggacttgccggaacctgagggaccgagcagcaccagcacctggccgcgcttgacgtcgaaactgacatccttgagcacttcgtgatcgccataggatttgcgcagatgacggacggacagcagcggttcggagtcgttggacacggacacttcttctgaatcagccattgttacgctccttggctcgcttctccagggccttggcgatcatcgccagcggccagcaaatgatgaaatacagcaggaaaatgaatccgtacacccagaatgcggcgtccgggtgggtcatacggttggcctccatgatctgctggcccaccgtgatcacgtcgatcacgctgatgagcagcagcagggacgtggtcatgatgacgcgcgccgccagattgatggtggccggaaccatcaggttgatggactgggggatacgcacgtaccacagcacctgcagtccgttcatgcccagcgccttgccggcatcgacctgatgatcggatacggaaatcaacgagcctcgtacgatatcgctgatttcggccgcgacccataggccgaacgtcacgactgccacggtcacgccgtcgacctgcacgccaagttcgcgcggcaggatgtaataggtgaggaacagcagtaccagcgtgggcacgatgcggaagaactcgaggtacagcctcagcaccgcgcgcagtaccggattgcgcaggatacgcagtgcgccgaggatgatgcccaggggaatgcccaccagcagggccagtccggccaccgtgatggaggtgccgagtccgcccagcagacgggtgaagttgtcgccggtgaacagcacgctggcgccggaggcctcagttatcgccgaaagtaccacgacggaccctcctttccagcagtgtgaggatgacggacaacgggataagaatgattgcgtaggcgatgaccagctccagcaggtattcgtcgctgcggtagtacatgccgatcaggtcgcgtgcggtgttggtcagttccggtaccgcgataacggtgaacacggaggtctccttgaccatgaaaatcacgttcgcggcgacggccggcacgctgcgcgtgagtccctgcggcagggtcacgtgacgaatcatctgcaaaggcgagagtcccagcgcgcgtgcagactcgttctgcacctgcggaataccgctgaagccgccttggaatgcgccggacatgtatgcggagcccagaatggacataccgacgacagcgcagatctcggcgctccatttgatgccgatggacgggaatccgtaatacaggaagaacaattgaatcagcaaaggtgtgttgcggaacagctcctcgaatacggtactgatttgggcgagcacaggcacgcggtattcgcgcagcaatgccagcaccaatcccagaagggtagccagcaccacgctgattgcggaaagacgtaacgtcaagacgaacgccctcctgaacagtggaagacttgcttggatgacttcccagctcacagccggccctccttccgtatacgtagtaatgcttgttgcatggtctctctcaatggttgcgggccgcatgtatggggtaaaacgtagcggctccgtgtgctaacccataaggataacgggtggcgggggagtatttcgccaagaaaagaacgttcgacgagtgcggataaaggtattgacttggaggtcggggtggtgtattgcaagagccgttgctcgaactcgcagccggctgatgcgcaaaacccagtagtcgcaaccgatggcatgtgattgatgagcttcgcaatatgcattgatgatgtgccggccgggttttgcgttatgaacgccgtttataccctgctatcggatactccgaaatggggatgttcatattgtgcgagtcgagcatttcgcggttcccgtgcgcttgtcgcttggctctttagacttaaaggcatgtctcttactatcggaatcgtcggactgcccaatgtcggcaagtccaccatgttcaatgccctgacccgcaacaacgtgctggccgaaaactatccgttcgccaccatcgagccgaacaccggtattgtgccgctgccggacgatcgtctgccggtgctggccaagctggttcacaccgagaaggtcgtgcctgccacggtgaccttcgtggacatcgccggcatcgtcaagggtgcctccgagggcgaaggcctgggcaacaagttcctggccaacatccgcgaggccgacgcgatctgcgaagtggtgcgcgccttcgaggacgacgacatcgtccacgtcaacggcaaggtggatccggccgacgacatcgacaccatcaacaccgagctgattctcgccgatctgcagaccatcgaaaacgcgctgcccaagctggagaaagatctgcgcggcaagaagatcgagccggcttacatggacgccgtcaagcaggccaagaccattcttgaggctggcgagacgctcgacaaggccgcgcgtgaaggtcgtttcgacaaggattccgtctacgacctgcacctgatgaccgccaagccgttcatctacgtgttcaatgtggacgataacgagctggccaacaaggagctgcagaccaaactcgccgcctccgtggccccggccccggccgtgtttctcaacgcccagtttgaagccgacctgaccgagctcgacgaggcggatgcccgtgaaatgctcgccgacgccggcttgagcgaatccggtcttgaccagctggctcgtgtgggcttcgacatcctcggcctgcagaccttcctgaccgcaggcgtcaaggaagtacgcgcctggcagattcacaagggatggaccgccccgcaggccgccggtgtgattcacaccgacttcgaaaagggcttcatcaaggccgacatcgtctcctatgacgatttcgtggccgccgatggttccatggctaagatcaaggaagaaggcaagctccgtcaggagggtcgcgactacgtcatggccgacggagatattgtggagttcaagttcaatgtgagcaagcattagttttcaatggtttgaaccatgtacatgtaaaagccaccattaacagccaccatggtttcagcgttatggaatattctcagaatattcacatttcatagtgtatgaaaccatggttcaaatggaatggttcagcggattgtgtcatacatacctcaaaaacgcgtttaaacgcccttctaacggcttttcatatgaaatacgatgaagtattcatgttcatgctgaaaccgcgttaaaaccgccttagaatgattttatccggattccatcggtttcaaatgtatgtttgatagatatcatgatgaacatgaatcatcggattccataacagtgagtatggttcatgatttcaagttgataacatagataaagataaaaatgaaccgcgtcggattacgcataagttgttaatccaatcatgagatgaatccggcgattgttttcaggtaatcatgaaccgcaatgagattgaaatcatggattgattggatgaatggcattcattggaatgagcactttcatacagcatttcaatgaaatgtaaatcaggttaacatgaaccgcaatgagattgaaatcatgagaatcaggcagtcatgcgccccgtcaaaaagcatgtgtatgaaataagtgaactaagaacttaaaaacctgtttaaaatattggtatcgttttcaatgtaatggttcaaacattggtaggcaatagacatacaggtgaggtttcagatagcattaacgcggcagtgatacaacgcgttgtatgtgaaatcttgttctaatgttggggtctttgtaggtagcaaaagggcgagagcctggcaaacgatggagtagcgtccggtggagcctacaccgtgtatcaccgtatgcccttgtagaccggattctttcaaaaaagatcccgagggtagggattcttatatttaaatatagatagaatagtgtccacctgacggcggcgttttaaaaaatgaaaccatgatatttaaacattgtcattaatatattgcggcgtgccggtataaggaacaaaccggcacgccgtttccttttgatagatgattcatgaaaacattcaacaaaggattatggattatgattattttaaatagtattgtctatgcggcggatttggctgatttaagcgcagtatggaacagcatggttcagaaatggataagtcctattgttatcatggtaatgggcgcactatcattaaagttcctgttgaacaggcaatggagtcagttcattaacttcctatccattggtatcggcgttgctgttgttgtatatattgctcctgtgatgttcaatgaaaatagtgatttgattaatagcgccagtgatacggcgaaaatgattaactgaaacgaatatgattggattgtttgatatataatacatgaatccaatccatatccaataatgaaaccggtgagaatacaaatcaccggtttcattgtatttgaatgaaaatatataatattgaaaatccgtgaaaatcgatgccgtccacagggctgaatattacgcgccctgtggacggcatattttattgaaaccatgaaaaaccgcgtttatgactcatgatacacgaaatgttgaaaatcgctgtcagaatcgaaatgagcgtttcaaatagtatttgaataatatgctatttcaatgttgaaatatgtatttaaataccaccgttcaaaagttataataagatgaacggtttgaatactatctatcaatatttaaaaaacctggaaaatactggattttcattttccatttcaatggcgaaaatgcggattctcaaatgatatggcttttgaacacagtttgatagatagagagtgaaaacatacattctattgaaaggattaataataaaatgttatatggttatataagggtttcaactggaacgcaggcaatacacggctattcattggatgagcagaaacaggctttaatgaatgctggtgtggaagaaaaccgtatttttgaggacgcgggcaaaaccggaacaaactttaatcgtgatggttggattaatctgtcgaaagcagtccgtgagggcgacacgattgtttgttattccatggatagacttggacgcaacttcaatgagattgttttaaatatgaatgtattggaaaagaacggtattaacatacgcactatccgtgagaatgttaacacggaaaccgcagcaggaagaatggttgcgcagattttcagcgcggtcgcggaaatggaacatgcccttatattggaacgcacggcggcaggcagagaggcggcgcagaagtccggcaaggtatgtaatcggccgaaaacatacacgatgagaaaagcaaggaaagcattggaataccgtgaacaaggatggactattgatgacatagcagtgcgtttgaaaacctcacacgcgggtgtctatcgcatgatggcggacgcgaaaaaggaacgcgagacaaaatgatgactatgttgaaacggattgtaagtgtaatggtttcatgtgtattcatttcaatggtatggaaggaaataatatggttgatagtaatacaatgaggaaagcgcggcgcgttatggcatggtttaatattaagaatatggataatgctatcacgctggttgaatattatcctgattatgattatgatgatttcaatgtattatttgaacagtatgacgcatggaatattgatgattgtattaacaaaatcctgtgtccgaatccgggacttacaaatattccaatgaatattacgccgccgaaacattaacaaacaaatgtcatattcaacatcactattgatgtcaacatatggtaatgtttaaaaaatcccatggttccactttaaatatggaaccatttttttaatcccagttgaacggcgcacacaaaaaccaacaataaatacattacattaaacaaatcacacgcgtttcacacatgaaacaagttcatgtgttcacatgtgttcatatgttgtgttccaagaacgcgctaccactcgccacacacatttcatagtatttatcaggttctgtggttatgattgttcgcgcgcgttggaaagttcgcggcatcgcttttttgtgcttattttattttttcttttttattttttgttttcattgtttattttcatggtttcatcaacaatattattcattgtttgaacatttgtatcattgatgaatcgttcaatggtttcacgcttcatgtttgatgttatgtgcgtgtaatgttgcgtcatttgagcgttcatgtgtcccagtatggcttgtgccatgctgattggaatgccgtcatatgccattaatgacgcggtgatgtgtcgtgtggtatgtggtttcaaatagttgtcatcggtgagtttgttattccatatttcattgaaataatcgcgttgtattctatgccatatccagttgaaatatgagtatgtcataacatgtttgttctttatgaatatgacatgttcattgtttataatcgttccatcgcgccatactggtgttaaaacagtatgatccagtgtttgaatatggttcatcaatattgcgtaataatccattggtaatggtattgttcgtgttttatatgtatccgcgcgtccttttgttcctgcttttaatgtattgttattaaccagtgttttattaatagtcagtgtcatgtttgcgtctgaaatctgttcccgtgtgattgctaatatttctcctattcttaatccgagtgtcatgagttttataataggatacatgtgtttatatttatcgtttttttcaacatatctcattattccacgaaaatcattaacatattgttctattttaatattgtttttaatggcggttttattttcatagcttggtttcaatagtgttggttttattttaatgtaatcgcgtttcaacgcatagtttaataccgcattaatcaatgatgaataatgaaatgcggttgactggggtaatgttttatcaagtattattttttcaatggtttcacgggaaactgttttaaccggtagtttttcaatggttttaaaaccgttgttccattcatgaactcgttgtgtgtatgttttttcacctaagtttgcttgttcaaggtattcattaaataccattttcaatgaagggttattcttattcacgcgtggtttattcacgcggcgtgccggttttattattccatccacgccgatttctgcgacgcgttttaaatgtttattgtttaaatccgcgcgtgtgtatgcgtaaacataacgccattttccatcctgtttccatttcatacagtattgttcatgcccgttatgaatggttttgaatgttgaagccatgctatgagcataacatgtagccaccaaaagtagccaccatttcatgtatgctaccccatgaaaaccattggaaatactggaatgtattagttcaagttcaacgtgtccaagtagtgattgccgattagtgccgagggccttggaagcgttgcgttccaaggcccttgcctatactgtagacagttgttcttcatatgtgaatcgtccgatatgactttggagcgggcttgattggaggggccggatatgacgagttacgtgctgcggctctatgatgatccgctgctccggttcgatgcgtcgtatggcgagggcctgctggcgggcaagatcgaggcgcatgtccgctggttcgatgagtcgaagcgtgcgttgctgccgtttccgttggctccggagccggataatgcgaagctgacgacgtggctggagcggcgcacgattccgaagaatcgtgagttcgccacgcaggttctcgcgcaggcggggttgaacattgcggatacgctgggcatcatcgacctgtgcaaggggctgtcggtcaacgattcgttctgggcggaacgcgacggtgagaacctcaagttcgcggacatcaacctgtatgacaatccgttggacgagacgctcgccatcgtggcctacacggggtatacgtcgagcgagaagcatgcgatcggcctgtcgagcgagtggacgacggacggccagttcccgaaggcgtggcggcatacggaacgtgggctggaactgtggaaggcgggttccgaagggtatgcgaacgccggtttggaaccgtattccgagtatctcgcctcgcagctggcgcgcaggctcggtgtgaacgcggtcgactaccgcatcgcccgttggaagggcaagctcgcgtcggtgtgcggttcgatgaactcgaaggacgtgtcgttcgtgccgttctatgtggcgacgcagctggcgtcgttcccggagatcctcgccgccgcacgcgccgtgtccgaggaatcgttcgaggcgatgcgcacgatgctagtgttcgacgcgctcatcgtcaatcaggaccgtcacgccaacaaccacgggttcctgcgcgacaaccgtaccggccggattctgggtccggcgccgttgttcgaccataacatgtcgctgttcaagaacgatatgcgcgccgactgggagggcggcgcgtggattccgcaggtactgtccgaacgtcagccggcaaattctcgtatgacgttccgcgaccagtgcgcggccatcatgggcagcgcgcagcatgagatgttgcgcaaaacgttggacgtcaccttggagaatgacccggcttacccgctggagccgggccgcatcgaggcgttgaacgactacctgcacgcggccgcacgatccctgctcgaactgccggtggtcgacgaatcgaagctgtccgaccagctcgatgcgttgcagccgtcaatcgaacacgctcctgtcatcctcaacgaacgactgttgcgatagaccaaaccggtcgagttcgccaataaaaaggaccttccgggttgcgcactgtgaggaggcgtggaaggctgctattgacttgaatcctattatgcaaccgtgactgcgtgcctgccgattgcctgcgatggtgtgctcctgctgcggcaatatactcgtaatagggttttctcatgtgagatatcggaatggaggcaggcatgccggctaagcaataaactggtagctgcatggctggttctgcatgaggatgaactctataaggcgtggaacgaggccgtatccggtcgcccgttcgaccgtatcaagccgctttcatgaggaaaggagcctgtcatgtttgaggtgaacggcatcctgtacgcggataagcccgttcgggagttggaaatccggtcggcccgcgtcaccggcgaccacatcatgctggtgacgttctccaccggcgagacacgtttatgcgacttcactgaaatgtacgacgacgtccctgcttttgctccgctacgcgatgagaagaccttcgaccccagcaccttggacgacatccgcccgctcgtggaggcctgacgccggggcgcttgatccaatgaccaccatcgtcgtatgtgcgattacagtggtcattttcatatctacggtacggggatgacgtgaacggccaacatcaccatgattgatggcggccgtttgcatatccacacatggctttgatgtctcagctgtccagagcgaaggtgatggaatcccgtcctagaaccgccgcgttacgtgcgcgactggcggcagcatcgcggtggacagggcgaacgtcaccgccaggaccgcgcccgccgggtagacgctgtacgcccagccgtatgcgatctgtccgaggggctgggcgcacatgctcgcggagagcgcgagcgacatcaccttgccggtcatgtcctcggggcagcccatctggatcgccggcacggcgatgaggttcgcgagggtgatggcgatcatggttccgcaggtgctcgctgtgagcaccgcgagtcgcatcactccacctgcgggaatcgtcatggcgagcgcttggggcaggatggtgagcgagaaggcggcgatcaccatcgggaatcgccgcatggacagcgacctcgcgacccgcccgccgacgagcgcgccgagcagtccggatgctcccacgagaccatatgcaaggccgtacgccgtggagccgaaccccagtacggtccgcaccatgtaagggaagccgacctccgcataccccgtcaccaggaagttgagcgcggcgcagatcaacaccagatgcagaacatgaggatgttcgcgggtgaggaaacgtccggccgcgcgcaggtcgtcgaccgcggtgacgcggccggcgtcgccgcggtcgggagcgccgagccggatgaaacactccacgacggcggccgcaccgaaccccacgatcgtgatctccatcatgggcatcgcaccaaccgccgcgtacagcacgccgccgagcacggcgggaacgagcgtgctcgtctggttcactacgttcaccacggccatcgcgcgacgcatcacatcctcgccatgggagcggaacatctgcggcagcgccgcctgcaccgtaggcgtctccatcgcgtcaagcacggcgagcaccacctgcatcacggctatcgccgccagattgaaaccggcggccgaaaagatcgccgcacagacgagcaccgtcatggcggaaagcgcgtcaagcgccaccatgacggtccgacggttcgtacgatccgccatcacgccgccaaggggcgagagcagaatcgtgggcaggatgcttgcagtaagaatggaggcgaacgccgccgccgagccggtcttgtcaagcacccacatggacatggcaaaccgcagcataaggttggcgaagagcgatatgccgagacccgcgacgagcaggcggaagtcgcgtgtgcgaagaggatcagcggcttggcttctttgtggttgggtcgtgcattcgtatgcgttcgtcatcgtggattcctttcttgtgattggccacggccatttatacaaaccgaccgtcggtctgttattgtgataacaatacgcccaaagaaaaaggcgcggaagcgcttcgacatctgtgacgtcaggatgtgcaagatgcggcgcacccgggcgcgtctcctatgcggacgctgtatcctcttccggcgtcaggaccgtgagcccttcggtcgtccgcaggatgagcgtctcgtcgaacactggcacgccgatggcgtcgaacatcgtggcgaggcagcggatgcggtgttccatgccggcatgatcggcggggtagaagcagggcatgagccagtagttgccgaggagcgagagcagttgcgccgcctcctcggggtatgccgtgggaatggagccgtcctgcacgcccatatcgatgagcgagcggaaggactccggcagtctcgtcgaccagaagcgcatgttcgccgtaaagaacgcaggatccttgagcagcgccagctgggaacggactaggtccagatgatcgggggcgtccacggcggaaacgatgagcacgcgcagcttctccagcgcactcatgtccttgcgctcgatgagtttgtcgagaagacgcgcggtgacggcccactcgtcggcgttcagccggtcgagaatcgcctccttcgatttgaagtggtggtagagcccgcccttggacagtcctaggtcgttcaggatgtcctggatggacgtcttctcgtagcccttttcagcgaagagcctgcgggcggaatcgaggattcgtcgttcggtgtctccggaatgcatatcgtgcgccatgcggatggcctgcctttcgttcatgtccccgtcaagcatacagaccgtcggtcggtctgtcaaatgatcgaggaagtcacccctgcgatgcgattgaatatccgcggcaaggcaggacgaagaagaccggtaagacgccgagttcaagttcaacatctcgaagtaagtgtttctctggctcccctctttgaggggagctgtcgctacaagcgactgaggagcggcacggataaggcctgagaagtcgtcttctcaggcctttgtcatgacattgttctgcaaggactggctgctgcagcagcataatgtgtgttttatcattcggccttggcggcttgctggtcaatccaattgttgacgtcggtgaccgcctcgtcaagggttgctttggcggctttgcagtatttggaatctacaggttgacgatttccgcgccgaacggccagagcgcgagcttggccatcttgaacgattgcagtccgaacggaataccgataatggtgatgcagttgagtacaccggctcccagatagccgagcgccatccaccagccgaccagcaccacccacaggatgttggccaaggcagagccgactccgccgccgtattgcacggttttgccaaacggcgtcagggtgagtcccgccatcttgaacgcttgaatgccgagcgggatgccgatgatggagatgcacagaatcagtcccaccaatgtccatccgattgcgatggccaatccaccaagaatgatccacaggatattgccgagaactcgcatgattagtccctttccgattccggtcgatgcctcgcatgttcagcttcactattttgccagacagcatgacggaaacacgagacgcaacccttagctcgcccctgattcattctcgggccgctattcaggcggatcgtatgcggtaagcccaatcctcttgtgaagattttgtgtattgtcgagcatgcgtgggtttcaccgtcgatttgaatgatgataggcttctcgatgtctgccgtacgaagaccccatcaaggagatgccatgaacctgtatcgctacgcgatgttcatcgcacgcgcctgccgtgggtcgttcgtcggcaatgttctgtttgccaatccacgaatggccctattctcgatgctggtgtagcggggacacgccttatgccgggatgtaccgatggcccatccgcagtcgacgtcgcatgaatcgctcaccatagccatcaacttacgcaaagccgcgaatcgtttgccgtatatgaatgcggaacggatggcggcttttcctttacgtccggactcatcggtgtcctcgcgtcttgacacaagcatggggccggatcgccacacatgacgttaccaacagaaggaaatgctgtgacctcacagaaaaacgcggaactcgggtccgccaccagttccgtaaagcctattgatccgcacacccgattcatcgttgtgggtgtgatcgtcgtcggctcgttcatcgcgctgctcaaccagaccgtcatgtcaccggccttgccggcactgatgcgtgatttcaatatcaccaccggcaccgtgcagtgggtgaccagcgtctacatgctggtctcgggcatcatggtgccgatttcaggctatctgattgataaattctccacccgaaagctcttcgccggagctcttgccactttcatggtcggcacactgctgtgtgccgtcgcgccgaatttcatgctgttgctcgtcggacgcatactgcaatccgccggctccggcgtgctgttgccattggtcgccgtagtgccgatgctcgtctatccgccggataagcgcggcaccgccatgggcatggccggcatcgtcatggccgccggcccggctatcggcccggttgtcggtggtctggtgattgacagtttcggatggcgcccgatgttcattggcatcgcagtcgtggcactggtcatccttgtcggcggcacgatgatgctcaagaacgtcagcgagttgaagaacccaaagctcaacatcctgtccgtgatcctttcgaccatcgcgttcggtggcctgctctatggcttttcgtccgcttccacgatgggatgggccagtccggtcgtcattacctcaatcgtcgttggtcttgtggccttcgtcgcattcgtatacaagcaagtcaagctcgatgagccattgttgcgcgttgacacccttgccacccgcaacttccgcaactccgcgattctggtcactctgattaacgccgcagtcgccgcaaccaacgtgacgttgcctatcttcatccagaatgtgctcggccaatccgccaccgtcaccggcatggtcatgctgcccgccgcggcggtcggcatcatcatgagtccggtcgccggtgccgcattcgacaaattcggcccgcgcggcgtgggcatcggcggccttgcgctcatgaccatctctcttggtcttctcggcactatcaacaccaggacatcagtgctgtttgtcgccgtgttctgcgcattgcaggcatccggtcaggctatcgccaacatgccgatcaacacttggggcgtcaacgctttgccgaacgacatgatcgcccatggcaacgccatcgccaacaccggccgccagatcgcggcagccattgcgacctcgcttctggtcaccgcagaaacatccgtgaccgcctcgcacatgtcccagggtgtgaagtccgccacggccagcggcatcgcgttctcctacctgctgtgcgccgccatctcgctgatcgccctgatcatctgcatcttcaccgtcaccagccgtgccaaggagaaggccgtacgcaacgccaaggcctacgaggcgcaagcctccgccgaagtcgcggccgaaaccactgaaggccagcccgccgagcatcactacgccggcgcatatgtggcccccgccgcctccctgttcaagcaggcccaggaacagtccatcggcgggatcatggacgatcagccctacagctgcctggacagcgatgacatcacgcatgtggtgcgcgagttcatccgcctcaacgtctccagccttcccgtggtgaacggcgatggcaggctcgtcggcttcgtcagcgacggcgatgtcatgaaatcgattgccacctatgaatcccgtacggtttccaccggcaccggttcaacgatggtggtgttcgacgacgaaaccgtggcctccaaggtgcaggcgctctccggcaagaaggtgatggacatcgccacgcgtaaggtcgttgccgccacgcccgaccagcatgttggagaggtggcccgaatcctcgccaagaagcagttcaagaaactgccggtggtggatggtgatggcagactcgtcggtgtgatccgccgtaagtccgtgatggaacatgccttcgacgcgctgttcccaaaggatgatcggtgattaggcgccatcatcgctgaatagaatgaatggaacatgaggcttcccctctcgcgggggaagcctcattgctttgtccgcggagtcttacggcacctgcgcaagggcaacgtcacgccttcatgatgcactattgaatagtgtgttcctatcgttgcatggtgacgctaacgcatggcgtcacgatactgaagcctgccatctaacggcgggtacggctcgttgctggagtcgtgcacgcatacgcgcgtcggcgtgcgtatgccgtgatgtgacctttgtagtggaattgaagaattgagaacactcgtatgtcttctagtagtaaaacagctgattgccagcgtccgtcgtgtgtttgctgacttgaaagatggcttcagctacactcggattcatcaacctgaccaccgcctccgataagctcgccgccaacgagctggggtggagtgtcggtatgctgctcagcggcgcgttggtgtctaccatcggtgccaagctcatccgcaacaacatgcgcgtggtcgccttcggcatcactctggtgggcgtctccgtcgtttgtcttggcgtggttcacaatctgctggcgtatttgctgattgatatggtgaacggtttgtcttcggccatctgcatgggctcgatgcgcaccatcatccagaccgaggccgatgtgattccaatctcgttggtgttcatcatcggcggcgtgctgaccctgcccgtcggcgtttacctgttcggccagacacggcgcaacactagtgtcgatgcggcgcgtaacgcggcctgatggcgattaagccgaactaccaaatttgtgcgtacgactcgtaggacgtgtagtccggcaaggcgttgcgtctcgagcagcagtacttcttcgtctccgcatccctgcacgacgccatccgcgtcttctacccgggccaggacaaaccggacctggcgaccttcccggacaagatcgtcttccagctcaacgacacccatccggtgatcggcatccccgagctcatgcgcatcctcatcgatgagtacggctacgactgggataccgcgtggtccatcaccaccaagaccttcaactacacctgccacaccctgctgccggaggcccttgaggtctggccggccagcctgatcggcgagctgctgccgcgtcacctcgagattatcgagaagatcaacgcgcagttcgaggccgagctcaaggccaagggcgttgccgccgacgccatcaaggacatggccatctacactggcgacgccgtgcgcatggcttacctggccacctacggtggctcccacgtcaacggcgtggctgagctgcactcccagctgttgaaggacgttaccctgaagaacttctccgacgtctacccggacaagttcaccaacgtgaccaacggcgtgaccccgcgtcgcttcgtcaagctcgccaacccgcgcctgtccgacctcatcaccgagggcctgggcaccgacaagtgggtcgccgatctggaactgctcaagggcctcgagccgctggccaaggacgatgagttcgtcaagaagttcgccgccgtcaagaaggccaacaagcacgcattcgtgggcttcgccaaggaccactacggcatcgatatcgacgagaacaccctgttcaacaccatggtcaagcgtctgcacgaatacaagcgccaggcactgaagatcctcgccgtgatcgcacgctacgccgacatcaagtccggcaagatctccgcagacgttgtcatgccgcgcaccatcgtgttcggtgccaaggccgctccgggctactatctggccaagcagaccatccagctgatcaacaacgtcgcccgcgtcattaacaacgacccggacgtcaagggcaagctgaacgtctacttcccgtggaactacaacattcgcctcgcacagcacttcatcccggtcgccgaccttgacgagcagatctcccaggccggcaaggaagcctccggtaccggcaacatgaagttcgctctcaacggcgccatgaccgtcggcaccctcgacggcgctaacgtcgaaatccgtgagcgcgtcggcgctgagaacttcttcctcttcggcatgacggtcgacgaggtggacgccctctacgccgaaggctacgattcggccaagtactacgaggccgatccgcgcctcaaggccgcgatcgacatggtgtccaaaggcgccttctcgaacggcgaccgcaacacctacgcgccgctcgtcgcggtaaaccgctcccttcacctaggggaagcccactgggcttcgcctttgacggttcagcgccttcgcctctgcgccttgacgccgcgcgcgtaatcgcgctcgctctgcacaaatgatgtttgtggagtagctgagttgcaacgaaaaagccgcataggaatgtggattccggtgcggcctttttgtgtatgggtggcgttacttgattcgccgccccgcgcaccaggcgtgttggacggaccagtcggcggggtcagtgagcagcacgtcggcggcgtatccgggggcgagcagaccgagaggtgcgccggtgaccggatacggccggtcgaatccgaaggccctcgccggggtcagcgtggctgcctcgatggcctcgaccggggacatgcccagctcgaggaccgcgcgttgcacggcgtgctcgagggtcaacgtggagccggcgatcgcgccattggacttgagtcgggcgtgtccgtcgaccacgtccacgtcgagcgcgccgagcttgtaggcgccgtccgggcagtcggtggcggccatcgcgtcggtgacgaaggcgatgcgatgcggcgcgaaaccaaggccgagccgcagcatcggatcctgcacatggaagccgtcgcagatcagctcgatggtgacgcgtggatcctcgaccgccgccggaatcggaccgggcttgcgatggtgcagaccgttcatcgcgttgaacatatgcgtcatcaggccggcgccttcgtcgaaggcacggcgggcggtctcgtagtcggcatcgcaatggccgaccgcgggcacggtaccggcggtcgcgaagctgcggatggcctggagcccgtgcggcagctccggggcgatcgtgatctggcgcaggcagccgtcggcggcctcgagcatccggtccacgatctcgggcaccgggtccttgaggcattccggattgtgcgcacccttgcgcgacaacgcgaggaacggcccctccagatgcgcgccgaggatatcggggcgttgatccatcttggctcgcatattgcgcagattctcgcactgcacgtcgatcggattcgtgatcagcgaacacacctgacgggtcgtgccatgcatcgcatgcccggcgcgcgccacatcgatgccatccgggccgtcatcaaagcttttctcccacgcgccgtgcgaatggatgtccacgtatccgggggtcatgatcttgcccgaggcatcgatgaccgcatccgctccgatgctattcgcacggcaggcggcctcgaaatcgtcatccgacgtgcctcgcgccgcgatcgtgccattggcgtcggccacaatccaagcatgttcctcgatgccgcgggcgtcgactttgcgcgcgtcccgaatcgcgaaggccgacggcgcgccctccatcgagtccgtcacctgcgcgacgatctgttgtctgtccatatttcaagctcttttcaaatcgtatccgtcatgggatttggtccattagcgtgcagtcagcggaccaaatcccacatccccaagcgtatggactcagatgccctgccaggacggcttgtgcgcgaaggcgtacttatagtagcccttgtggcgcagacggctggcggccgcctcatcgacgatgatcgtggcgtgcgggtgcagctgcagcgccgacgccgggcagaacgcggagacgccgccctcgacggtttcggcgatcgcctcggccttgcccgcgccgaaagcgagcagcaccagatggcgggccttgaggatcgtgccgatgccctgggtgatgcagtgcatcgggacttggttcacatcgttgttgaagaaacgtgcgttgtcgatgcgggtccgctcggccagcgtcttgacgcgcgtgccggaggccaacgaggaaccgggctcgttgaagccgatgtgcccgtcggtgccgatgccgaggatctgcacgtcgacgccgccggcctcggcgatcgcctggtcatacgcagcgccggcgccggagaccttctcgccgtcggtcaggggagcaccctccagaacgtcgccgggcacatgcaccttcgccgggtcgaggccgagcggctcgaccacggtgcggtggatcgtcgaatgatacgattccggatgcgtcagtggcagtcccagatactcgtcgagcgcaaagccgcgcacctggctcacgtcgttcgattccttcttgacaagagcggcgagcgcctgataggcggccagcgggctcgagccggtggccaggccgagcaccgcgtccggcttggccttgatcagatcggccacggagcgcgcgtagatctcacccgcctcggcctcgtccttgacgatgatgacttccgccatggtttccttctttcgttgatatggggttggtggatgggttatggagcgatgggtgcgggaatgacggcgtgtgtcagatggcgcccctgccggccagcgccgcgccgatcgcgccgacgggctggtccgggtcggtcagggacaggcggtcgggcaaacgcagcgaagcgacgaagcggcttgtctcttcgcgccgacgcagctcggtcgtgatgcagtcgagcagcgggcggccggttttcgccatgccgccgccgataatgatgctgcgcgggtcgatggccgtggccgcgatgtcgatggcgtcggcgatcgcgctgacgatggtatcgagtgtttcggcggcctgcgcgtggtccggcgcggccggattgccggccttggcgatgatcgccggcatcggcgggtcgtcctgcggccacaggcgcgtcgccgcgccgccgctggccgcagtttcgaggcaaccgcgctgtccgcaggcgcagggccagcggtgcggttcgaccgggacatgcccgatttcgccgacattgttgctgtatccgtggtccagttcgccgccgcggatcaccccgaccgccagtccggtgccgaggttgaggaagacgacggtgtccttgtcgccggcgccgtcggtcggcggcagcatggccgcggcgccgagggcagccgcgtttacgtcgttctcgacgcgggtgggcacgccggtgcgccgggcgacctcgccgccgagctcgacgcgcacgatgtcgaggttggcgatgttctcgaccgcgccggtcgccgcgtcgaccatgcccggggtgccgatgccgattgttgcgatgcccgcggcggccggggcgtccttggtcaaggcttcgacgacggagacgacgtcgtcgacgagctgttcggcgcccggccgcgccggtatcgaccgctcggccagcaatttgggccgcgcgtcgccatccgccgcctcggcgagcagcacgccggcgatcttggtgccgccgacgtcgatgccgatgcgcagcgtgtctccgcctgcctggattgtgctcatatggtcctccttcgattgcaaaagtgtgttttgtggaatatgcggtgcgtgagggtcacggatggtcctcctctttcgccggtcccgcgtcgctttcgcgtatcgtcggaacgcatgtgcggatgacgaccacggcctgtccccgtagcacaaggtcctccccctgctggcatcgatacaatcggggtgccgtgcgattgccgaaggagatgcttgcggacagctcctcgttcatcgatccaaggaacgcttcgctgacgatttccggaggaccgtagaccgctatgttgtcgaggtccagcagcccggcggggattgccagcacccgtccgagggtctgaccggcttcggagaggatctgcgtgcgccgttgtgggttctcggcgatcatggcatgcagccgcgaggaggagaggaaggtctccaggcatcccggacgtccacaggcgcagaccggtccgttgggatcgatggtgatgtgcccgatttcgccggcggtgaaggcctgcccgtccacgacctcgtcgttgacgcagagcgccgcgccgacaccctgtccaatgcgcaccagcagcgagttgggggagccctcgccgaagaatcgttcggcgatcagcgccatccgcgtcgagttgttgaccgacacgggcagtcccagcgcttcctcgagacgtgcgcgcagcggcagatgggaccaacccaggtgcacggcgttgagcaccgtgccctccgagtccacaatgccgggcaaggcgactcccacgccgagcgtgggcaggtcggatatggagcggagacgcccgatcaaggcgatgacgtcgtcgatcgtgatggcaccggtggtttcgacggtgctttcgacgcgttggacgatgcgcccgcatagatccaccagcgcgcctctgatgacgaaagactgcgtcagatcgatggcgatgacacgccagtatgccgtgtcgatggcgaggaccgtcgaacgtttgccgcggccagtgcgattgtcgatgccggtctctcggatgatgcggtggtcggtcatttcctcggtgactttgctgatggccatccgtgacagtccgatgtgccgtctgagttcgacgcgggacatatgcgtggcggggaacagcaggttgaagacggccatcgtgttattggcgcggatatccgacggcaccgtttttgtggcgatgttggtcaaagaagcctcgcttatgggtcgttccgatgcgaaatgcagcatgaaaagctcccgtcagcgcttgaagaggcgcttttcgatgatgccaatacctattgtgtcatctttgcgggcgggcatgcggcgtgaactcctttttcgagtcttgtgcgcggctaatcggctcgttgataggcttcaattgatgaatatagcatggtgaaattaattagtcaagatagttgcctaaatatgtcgggatggatataattgagaaacttcaatatttgcaacgattttgtgatgttgccttgcggtatgaaatgaggatgacggggaaagtgtcatttattagataggttacatactataattgtccgcatgagcgacacctttgttattcgtgagttcaatggcgacgattcccgactggagatcagcgattacggggctcaggtgctgtcgtgggcgccggtgggacaaccctctgtgatatggcgtccgtcggccttggtgctggaggctggcgtgccaatccggggaggcgtgccggtggtcacgccttggttcggggcgggatatgccgacgggcatgcgcttggtttgagtcccaagcatggttcggcgcggctgagtttctggcattgcgagggtccatccgattcgtcggatggccgtgtgcggtatcggctcgacctgcccgccgatgcggcggaccccagtgggcagccgttgcgtgcggtatatgaggtcggggctggcgggagcctgcgaatgacgctgaccgtcgccaatgtgggcgaggggtccgcgagcgtggagatggcactgcacacctatctacgcgtcggtgatgtgcgccgtacgcgggtgcgcggactttcgggcgtcggatattgggatgccgcggccggcggcgtcgatcgtgtgcagcgggaagaggacatcgccttcgcgggcgaggtggatcgtgtctatggggtcgcccgtccgctcgaggtgcatgatcccgtcctcgaccgcgtcatccatgtacgttcggatggtgcggaacagactgtggtgtggaatcccggggagcggatcggtgatgcgatcaccgacatggtgcccggcgaatggtcttccttcgtctgtgtggaggcagcgctctgccgcgggcatgcggtcgagctggcccccggggagtcctgtacgttgggtcagacgctgtcgttgtgagactgcgcctagcccgggccgacgaagttattggtccgggccaggcgcagccctttaaatgacgcatgtgtcatatatgtataaaaattatttcttcaccgtgaaccattgatatttcagtaatctttgagtcttttgcgtgcgttattcctaaatatgtcaacaaggttgacgaaatgatgtatactgaatcacgccagctatcactagcggcattcagtatcgagattcaaaggagaaaaggatactttcatggttgaatcacaggtggttctgacgccacgggcccgaaaggccgaacgatatgccacgacccttgcgctcatcgtcacactgggcccgctgttctacggattcgagggcatggtgctcaatggcgccatcagcgctgtcggcagcgaattccagcttggttccttcgccaagggcgtcgcaggcgccgcgggcatcatcggcggtctcatcggctcgttgatcgccggtcgtctctccgactacattggcagacgcggtgtgttgctgctggtcggtcctttcctcatgttcgaggccatcttcggcgcgttatgcccctatctgggcggatacccgttcctgctgttctgccgcatcgtcggtggcatgggcttcggcgctgcgacgaccgtcgccccgggatacgtcgccgagatctccccggcgcgcatccgcggacgcctgatctccttccgccagctcgctatcatcctcggcctgctcttcgcggcggtcgtcaatctggtgatgaccaatctcgccggcgattcttccgccgaggtgtttctcggcatcaaggcgtggcagtgcatgttcctgtgcctgatcgtgccggccctggtctacatgatcctcatgccgttcatccccgagtctccgcgctatctggtctccaagggcaggaacgagcaggccgccaaggtgcttgagcgtctgtccggcaccgacgatgtcaccgcgcaggtcgagtccatccagcgctcgctcggcggcgtcaacgaggcccttggcatcttcgccgtactgcgttcgaagtggcgtggcctcgtctgcgtgggcatggcgctcgccgccttccagcagctgaccggcaccaacggcatcttcttctactccaacaccctgttcgaagcggtcggcgtccctgagtccgcggccttccagcagacactgatcctgaccgtcttcaagatcatcggtgtgaccgcgggcatcctgctggtcgaccgcgtcggccgcaagcgcatgctgatgtacggcggcacgctgatcttcatctcgctggccgtggtcgccaccgtcttcaccgtcgctccgagcggtcccaatggccccgacatcagccacagccccgtgctcggcttcctcgccgtcgctgccctgtgctgcttcctgctcggcttcacctcctcctggggtccgatcttctcggtgatgatgggcgagatgttcccgaaccagatccgcggcagcgccatgtccctggcctctggcgccgacttcttcgtcaacttccttgtcgtgctgctcttcccctacgtcgtcgaatggtcgccggccgtcgcctactgggcgttcttcgtcttcggcgtgctggcggtgatcttcgccaagaagtatctgcacgagaccaccggcaagtccctcgaggaaatgggcgactgagccgcttcccctccggcgggccggtccgtccggcccgccgcgtatccccatgttcataacaacacccgcaccaaccaaaggagcttctcatggcagacagccagaccaaaccgcgcgtcgtcccggacaacgtgcgcaacatcatcaccttcatgaccgaccagcatcgcatcgacaccctcggatgcatgggcaacacccatgcgcagacgccgaacatcgactccctcgccgccgatggatgcctgttcaccaaggccttcaccccctccgcgatttgcacccccgcgcgttcctcgatgctcaccggccagctgccgttcaagcaccagacgctcgccaacccggagtggaacatcgcctattccaccgccatcccggaaaccgactggacctacacacaggcgctgcgcgacgccggatacaacgtcggcatggtcggcaaataccattgcggcactaatctgcccgacaagttcggctgcgacgatgacaccttctggggcgccgagaacccggtggccaacgaggaatacgtcgcctggctcaaggagaacgacctgccgccggtcaaggcccacgatatctggcgcggcaagctgccgggcaaccgtgacggccatatcatcgcggcgcggctcgagcagccggaggaggcgaccttcgagcgcttcatcgccgaccgatccattgcacgtctgcgccaatacgccaaggaatacaaggagacaggcaagccgttcagcctggatgtgcatttcttcggcccgcatctgccctacttcctccccgacgagtggttcgacctcatggacccgaaggatgtcatgctgcccaagagcttcggcgacacgctcgtcggcaagccgccggtccagcagaactacgcgacctactggtccacctcctccttcgacaacgaccagtggaggaagctcatcgccgtctattggggatatgtggccatgatcgactttgagatcggccgcatcctcgacgtggcgcgcgaattgggcctgatggatgacacggccatgttcttctgcgccgaccacggtgagttcactggctcgcaccggctcaacgacaagggcccggccatgtacgacgacatctatcgcattccgttcatcgcacgcatcccggggctcacgcacggcacgaagtgcgatgattatgtgcagctcatcgacatgaccgccaccttcatggagatcgccggacttgacccggcgcaggtggaggacggccgctccgtcgtcgatttggcgcgcggcgtcgaggtcccggattggcgcaggaacatcgtatgcgagttccacggcttgcatttcccgatccagcagcgcatgctgcgcaccgatgattacaagctggtcatcaaccacgagtcgctggatgagctctacgatctcaggcaggacccgagcgagattaacaacgtctatgcggcgccggcctatgacaaggtgcgccgtgagatggccgccgagctttaccgccagttggtcgagcgcggcgacagctccttcgccaagtggatggccgcgatgaccgacttcgacattccgctggagaacaccgcgcgctccgactgggaccaagtcgccaagtaacgccgtgctgcggtcgcccgacgcaaccgtcggacggccgccgtcccattcccgtccggggcagatatagggatggaggagtagacatgtatcgacggaatgcgttggatcaaggagttcatatgacaatcgcgacggcaccacggacgatacgggacgatggcggggccgccgccggggacgcgattcccgcgggaccgctcacgcgccgccaactgccgttctccgtcgttgccaagcccaccggcgcggcatgcaacctcgactgccagtattgcttcttcctgtccaaggaactgctttacgccaccaagcgacagcagatgaacgaggagacgctggccacatatgtcgccgaatatctggccgccagtcccgacggcgaggtgactatgctctggcagggcggtgagccgaccctgcgcggcctgccattcttccgcaccctcgtcaagctgtgcgaacgctatcgccgtcccgggcagcatgtcgtccacgcgatgcagaccaatggcacgctgattgacgaggagtgggcagagttcctcaaggccaacgacgtgctcgtcggtgtctcgatcgatggtcccgagccatatcacgacgcctaccggctcaaccgcgccggccgcggcacgcatgcgatggtgattcgcggttggaacatcctgcgtcaggccggcgtgcgttgcaatgtcctgtgcacggtacaccacgcgaacgaggagcatgggcttgaggtctaccggtatttccgcgatgagctcggcgccgacttcatgcagttcatccccatcgtcgaacgcgtcgatccctcgcagctcgagcgtgccgaacacgacggctggcgcgccaccggcgggcagggcgtcggcatgctgtaccgtcaggccggggacgcggtcacctcgcgctccacgcggccggcgcaatacgggcggttccttagcgagatcttcgacgaatggatctcgcgggacgtcggacgggtgttcgtgcaggacttcgatgcggccctcggcgcgttgtttgggcaatacgccgtgtgcgtgcatgcgcccgaatgcgggaacaacttcgcgcttgaattcaacggcgacgtctacgcctgcgaccattgggtcgagccggattggctcgtcggcaatgtgctcaaggaggacttccactcgctggcgcacagcgagatcatgcgccgcttcgccaggaaaaagcgcatcgagctgaccgatcagtgccgccgatgcccgtatctgcgcatgtgcaacggaggctgtcccaaggaccgcttcgtcaagtccgccgacggacaggaggggcagaactacctttgccccggctacaccgagttctacgggcatatccaccccgatattgtcggcatggcgcggctgctgcgggcgaaccgcgcgcccgccgaaatcatggatccgcaggtgcgccgacaggtgcgcgcctcgcggtgaccgctttcctcgtgtgggagcgggtaagaggatgcaaggagatcacggatggttgagttgattgtggcgctggccgtcggattgggcgtcggcgtcgtcgtcggcgcactgggcgccggaggcggcatcctgtcggtgccggtgcttgtgtatctgctgggacaggagccccatgcatcctcggccggctctctggtcattgtcggcctgaccgcgctggtctcgttgataccacgttcgcgcgaagggcatgtgcgctggcgtgacgggctggtcttcggcgtgctgtcctcggtaggcactgtgctcggatcgcgtctgtccgtgctcgtcgacccacggacgttgatgctgctgttcagcgtgctgttggtcgccgtgggcgtcatgatgctgcgcaaggcgttccgcgcccgccgtgccgatgggagcggcgccgcgggcgccgagggcgcgtcctccggccgacgtgggaggcgcggtctgcctctgctgatcgcttgtgccaccgcgaccggcttcctcaccggcttcttcggtgtgggcggcggtttcgccgtggtaccgatgctggtgctggcactcggattcacgatgcgcgaggcatcctcgacatcgctgttggtgatgatcatcgcttcggttgtcggactggtttcgcgcatcggcaccagcatcagcgtcgactggatggtggtcgtggtcttcgcactggcctcgatgtgcggaggactgattggtgcgccggcctcgcgccgtgtcagggaaagcaccttgacgctgttgttcggcgtgctcctgctgctggtcgccgtcggcactctggtttccacgttgcttggaaactgatttggcaggcacgccggcatgacaaaactcccgagccaaacggcttgaaccgcaccccgattgttggactgaagaaatttagatccgatgattggaggtgcggttcttcgtatgcgggaggatcggaggaaacgctacgacgatgggttccggcgcgaggcattggggctcatcaatgccggcgtgggttacgtatcgcttgcccgccggcttgcgatgccggcatataccgcgaaacaatggaccatgttgtataggtccggcggcgaggagtcgttcatgggtgtgcagggcagcaggcgatacgactgggagacgaaggccgccgcggcccgcgaccatgtcgacaacggcctgacgaggaccgaggtcatggccaaatacgatgtggcgagcgtcgcaccgctgcgacgctggtgccgcgagtggattggctacaatgtattagacagtccgatgggggacgattgacgtgggattggaggccgacgatggccggcccgaagcatccccgtcactacgaggagtcgttcaaacggcagatcgtgcagttgtatgagaacggcaagccctcccgggagatcagggccgagtacgacatctcgcattccacgccgcaccgttgggtccagggcatccgcgacagcggctccacgaaagccgccgacaaccgcacgcccgggcggaacgagccggtcgggccggggaggcgcaacaggcagttggagatggaggtggacgtttcaggacgagcggcgccggcattcgcacgaaagtagcggtgatacgggccaacgcctcccgctgcccgatatcggcgcgatgcgggatgccgggcgttccccgctccgcctgttactggatggccgggcataccgaaaccgagcggatcgatcccatcgcgggcgacgtgcacgcggtctggcgcgacagccatgagcgctacagagcgaggaagatcaaggccgctttggccaggaaaggcgtcaccgcgtccaggcgaaggatcgtcgacatcatgaagcggcggggcatgcgggcgcgtacgcgcgcagacggtccgaaccgcacaggacgcgggccgacgaggccgggctcgcgaacatcctcggccgcgggttcgacggctgcgagccgcgcacccacctggccggtgacctgacgtacgtgcgcgtcggcggcgagtgggcgtacgtgtgcctgctggccggcctggcgaacaggggcattaccggccattccgccgggcgggcccgggacgcgagcctggtattgggcgcgttcgccacgctcggcttccccctgaccgaggtggaggtgttccacacggaccggggcggcgggttcgacaacgcgaaaatcgacgggccgctcgacgtgttcgacatcggaggatcgccgtcgaggaagggcgacccgtacgacaacgccgtggtcgaatccaccaacaggctcctgaagaaggagctcatataccggaaccaccacaccggcctggaacaaccacgctccgacctcaacgactatgtgtggtggtccgacgaccaaagactccactccacccccggataccggagccccaacgaattcacacaacaaggactcgtcctctaaagaattgtccaacacgccgttgccaatccactggcgtttcgcaatggccgtggcgtcgatacggaacggttgtcccgtctgctggatggcatgccggtcgtcgcggtcgacgggcgtaccggagacagcgccaaggcattggccaatgccatcgcggcgggtttccgggagccccccattccccatgggctggccgcatggtccggcatcacggccgatgccgatgggcgtaccgccgatgacctgcgctcctgggctgaatcacgggccgatgcccgccttgggattggacggtcgcgcgtttttgccgatcatcgtcggcttcggctgcaatctgccggccttggcggccacccgcaccctgcctgattcccgtcagcgggtgctgaccggcatgttggtgccgttcgtcgcgtgttccgcgcgcctgtcggtgttcctggtgctcgcccatgcgttcttcccgaaatacgcgggtctcgtggtgtttctcatgtacgtcgcttcggtgatgatcatcctgctggtcggcgtggtgctccgccacaccatgttccgtgggcttgaaccggatccgctcatgctggcgcttccctcataccagtgcccccgcgccctgcaactggttcgcccgatgctgctgcgcctatggggattcgttcgcggcgccagcgtgatcatcatcgcgatgatcgtggcgctatggttgctgcagggcattcccatgacggccggtgccggtgttttcacgttccgggcaatgatatggtgcgcgggagccgagctattacgcttggctcccgttgccatggaaaccgcaatgagaggagaggatcccatgatcgcaggagcgtccgtcaccacgttgctgttggtgctcgtagccggcgtcgccgccggattcgtcggatacgcggtcggcgcatcctcattggtctcctatccggcgctgctggcgttcggtattccgcccgtgctgtccaacaccacgaacacggtgggcgtgtgcggcaccggcatcggcggactgctctccgcccgcaaggagctcacgggccagggcgggcgtgtggccgtctatgcctgcataggtctggtcggcggcgtcatcggcggcctgctgctgcttgaattgcccgcgaaggtctttgagttcgcggtgccgccgttgatcctgttcagtgcgctcatcatcgcgttcaatccacggaggaaagcggccgcgcgcgacgccgtggcgcgggcgctgccgcaatcgtatcaggcggagcgtgccgcgcggatcgccggggcgacgacgaacggcgcgttgtgcgacgatccatggtggctgtgggtcggcgtgagcttcgtcggcgtctattccggctatttcggcgcggccgccggtacgctcgccctggcgattctcgatttgggcaaaatcggcccgttccatcagatcaacgcgttgaaaaccgtggtcggcttcggcgcgaatatctccgccgcggtcatgttcgtcatccgtggttccgtctgctggccgttcgccatcatgatgtgcatcggctgcaccatcggcagtgcgatcgcgcctcccatcacccggcgtattccggagaacgtcatgcgggccgccgccgtgttgaccggcatcgtcctcgccgtcaagcttggctggagcacttacctgtgatggccttggttgctggggcgtgctgaacgatcgcggcagtgcggtgattcatgggcgtgggtgggggaatatgacgatcccgtcggatggaaggcgtgttccgtccgacgggatcctcgctcgatcggtcgatgatcgatcaatcgtgcatggcttcgatgttgttgccctccggatcatgcacgaacgcggcatagtaggtcggaccgtagttcgggcgcgggccgggctggccgttgtcggtgccgccgttggccagacccgcctcgtggaacgccttcacggcgtcgtcgccggcggcttcgaacgccacgtggaccggcgcaacggtatcgccttcagcggcggtggaaacccacaccgacgaaccgtcttccgccacgaatgcctgaacgcccgggaaagcggggcccttgctgtagcccagcggcgccagggcggcctcgtagaacgcctcctccttgtcgaaatccttcaccttgacggtcacatggttgatcatgatctgtcctttcatgcgttcggtgcgttgtgcatccgaattccatgatagacggcaaacgatgtgaatcggaagggcggcgttctggaaggtcgcgaagtccgggccgttgccgcccgtgccacgatgaccctacagcccgtggacgctcgccccgaacggccagagcgcgagtttggccatcttgaacgcctgaatgcccagaggaatgccgatgatggtgacgcatagaatcaatccgattagcacccaggagattgcgatcgccaatccgcccaaaacgatccataggatattgccgatgattctcatagcgggttccttacgctcgaccatcttccggaagacgccggatggtatatcagaccttcattctatggtactggtgtgagatgaggctgggccgggaacgggcccatacgtcctgaagcgatgagtagattggagcgaccatgcccgtggcgtccgatggggtgggcgggtccggcgcatatgccggggccgtggcggacgagggggccgatgccgcgtgggtccggcgtgtggcgttgctgctcgtcggtcaggcgttttcgctgttgggctccagcatcgtgcagtacgccatctggtggtggatcgtattgcagaccagaaccggttcggcgatgctgctggccaccctgttcggcgtggtgccgcaggccgtggtctcgatcttcggcggctcatgggcggaccgccataatcgcaaactgctgatcatgctgccggacatggtgatcgccgccgtcaccgtcgtgttgtcgttgggtttcgcgatgggatgggccggactggccacgatcttcgtggtgctgctcatccgttcggcgggcggcggcatccagacgccggccgtgcagtcgttcatcccggacgtcgtgccctccggcaaactgttgcgcgtcaattcgatatacggtgtgatcaattcggcgaacatgatagtggcgccggctgtggccgccgtgctcatcaacatggtgccgttgtggtcgattctgctgatcgacgtgaccacggcggtcatcggcgtcgggttcgtggcgttgatcaaggtgccgaagagacgcgcgacggcggagcgtgccgcgcacgccgtgcccgaaggggagggacgctcaccgctcgccggcgtccgccgtgtcttcgccgatctcaaggtgggattcgactacacgtggcgtcggccgaacctgcgcaacgtggtgttgggcgacgcgctgacctgtttcatcgccgtggccccgatgaatctgaccctgctgctcatgacccgcgaatacgaggggatcgatctgaatctgggattcatcaacctgaccaccgcctccgacaaactcgcggccaatgagctgggctggagcatcggcatgttgcttggcggcgcgttcatgtccaccgtcggggccaaggtcgtgcgcgacaacatgcgcatggtcgcgctcggcgtcaccttggtcggcgtgaccgtgatgggtctcggggtcgcgcccaatctgctggcgtacctgtttgtcgacgtggcgaatggtgtcgcctccgccatctgcgtgggtccgatgcgcaccatcatgcagaccgagtccgatgagaatgtggtcggccgcgtttttggtctcgacaccacgctcagcacgctgggcatgccgctgggcatgctggtcttcgcgcctctggccgatatgatcccgatttcgctggtgttcgtcatcggcggtgtgctgaccttgcccatcggcgtctatctgttcggccagacgcgcaggcgtgccggagcggtgccggaccggggacgatgaccgccggggaagcccccaaaaaaacagtgttcatgtgaaattcaccgcatattcgcgcttttgccggcctgccatgattagccttgaacaaggaacagcagagtagaagcagaaggtatgcgcgtattcgattttgacggaaccatctacgatggcgaaagcctgttcgacctgtacctgtattccgcccgacacgacccgaaggtgttccgcttcatcgcacccgtgctgcggtacgcggtcaaatacaaactcgggcgggccacgcttgagcagatggaatacggcgtgggcaggatggccgaaggctatctcacggaactgaaccgttcccggcgtgtggcgagcgtcgaacagcttgtgaacgatttctgggatcggaactacccgcgcatcaagccctggtaccagcccgaaccggatgacgtgatcctcaccgcgtccttcgacctgacggtgggggaggcatgccgcaggctcggcgtgcggaacctcgtggccagcaaggtcgatatggagacgatgacggtcacgtatctcaacttcaacaccaacaaggccagacgattccgcgagctgtacggtccggacgccgtcgtcgacgagttctacaccgactcgaggttcgaccagccgatgatcgatatggcccgtcgtgcgttcatggtcaaagggaataccataacgcgggtgaaatagcggacggcgcggaacaacgaagcgtcaccgacaacgaaggaggagcacagatgagcatgccgctcgatctttacgtaatccgacatggcgaatccgaggcgaacgtcatcgtccaagcgggcgaacagggcgacaactccctgtacacgcaggacaacgtcaccgtgcccgaccgctcatggcggctcaccgccaccgggcgcaaacaggccgactgcatcggacgctggctcgtcagccagcagcagctgttcgaccgctacatggtctcgccgtatgtgcgcacccgcgagaccgcggccaccatggccttgcccaaagccaagtgggaggagaaccgtgtgctgcgcgaacgctcttggggcgagatcaacaccatcaccaaggacgagttcaaaaccaactacgcccgcaactggaacttcaagaacaccgacccgttgtactggcggccgccggcgggcgaatccatcgccgacgtggccgaggaccgcgtgcataacatcctgacctcgttgagtcgcaaatccgactcggagtccgtggtcatggtcacccatggcgacttcatgctcgccctgatgctcaccatcgaggatctggccgatgaggagttcctgcatcgcgccgattcggacgactggaagatcaccaactgcacgtgcctgcattacacgcgccgcgatccggaaactggtcgtacttccaagcgcgtgcgctgggagcagaccgcacgtcccgtgttggatgagaccaccggacgctgggaggtcaaggtggagccgtggcgcgaattcaaacgcccatatctgtccaatggcgatctggtggacgtggtgcaggccgtcgacccgcacctgctggagtattacggcaaatagcttgcgcaaagtgcgtcttcgcaaaatctccatgagatataatggcgcgcagcgcggtcggatgtgtgtatgccgtgcctgacgccaagagcgaggagagtagtaatgtccaatatcttccaatggcaattgcatggcgacggcaagacgttgcagcccggcgaggtggtcgagcccgatgaacgtctgacttggacgcgcaccgccggcatcggtgcgcagcacgtcatcgccatgttcggcgccaccttcctggtgccgattctcacgggctttgatccgtctaccaccctgttcttcaccgccatgtccaccgcactgttcttgctcatcaacaagaacgtgctgccaagctatttgggctcgtccttcggcttcatcgccccgatcaccgcagttaccaccgccaacaagggcatcgcggtcgccagcttcggcatcatgtgcaccggtatcctgctggctttggtcggcgtgctcgtgcattacgccggtgccaagtggatcgacatcatcatgccgccggtggtcaacggtgcgatcgtggccattatcggcttcaatctggcaccctccgtatggaccaatttcaaggccgcgcctgataccgcagtcgtgactttgctggccgtgctgcttatcgccgtgctgttcaagggactgcttggtcgactcaatattctggtcggcgtgatcatcggctacgtttatgcctgcttccgcggccaggtcgacttctccgccattaatgatgccgcatggatcggcttcccgaagttccacctgccgcaggccgacttctccatcctgcctatgttcctgcccgtcgtgctcgtgcttgtggccgagaacgtcggccacgtcaagtccgtggcccagatgaccggccgtgactacgacaaccagatcggcaccgccctgatggccgacggtctcggcaccacgctcgctggcttcggcggcggctccggcaccactacctacggcgagaacatcggcgttatggccgccaccaaggtctactccaccgccgcctactggtgcgctgccgccttcgccctgattctgagcatgtgcccgaagttcggcgccgtgatcaacacgattcccgccggcgtgctcggtggtgtgaccacgttgctgtatggcatgatcggcatgatcggtattcgcatctgggtggagaacaaggtcaacttcgacaagccgattaacatcatggtcgctgccattactatgatcatcgccatcggccagttcgcattcaccatcggcggcacgtcattcaacggcattgccatcggtacgatcgtgattcttgtggcctaccacggcctcaaggccatcggcaaggccaccggcaccatcgccaaggacgatccggacgtgctgtagttgcccgatcgaccgtcttatcttcatcagcgacagaaattcaggaaaagagtggcttcgtcctgaatttctgtcactgagggtgtctcaacgacaggattttaggatgagtggggtcatttcctgatttcctgacgctaaagaacacatatgacgcgggttaaaaagtgattcatgaaacgttgaaagcaagatgtgcgagtagcgtcgtgaaatagcaagatccgtggtattcacaagcaaagtaggggccttacgctaggtttggaaagcttgcgtaatttgcgcaacctttgacatgaaaggccattgtgccccgtaacgattttgatgatttcgaggattccgccgatttcccgatgaatgacggcgagaaatccaaacccattacctttggtgaacttggagtacccggaccgttggtacgcgtgctcgcggcggacggaaaaaagaccgcgttccccattcaggccgatactttgcccgactcgttggccgggcgcgacgttctcggccgaggccgtaccggttccggcaagaccctcgccttttcgattcctctggtcactcgtcttggatcctatgattcgcttggccaaaccgcgatgaaggaattccgcgatgaaattaagcgtcgcaagaaggcaagtcttgaggagcgccgctccgatgatttcctgccccatccgcgcggactcgtgctggcccccacccgtgagctggccaaccagatcaatgacgtgctgatgccgttggcccatgcgtttgggatgaataccaccacgatttacggcggtgtcaagtacatccatcaggtgcgtgatttgaaggccggcgccgatatcgtggtcgcctgcccgggccgtcttgaggatttgctgcgtcagaaagcgctcacgctttcgtccgtcgaagtcgtggtaatcgacgaggccgacgaaatggccgacatgggcttcctgccgccggtcaagcgactgcttgagcagatttctcccaacgcccagcatatgctgttctccgccacgctcgatcatggcgtggatgaagtggtgaacacattcctgcatgatcccaaggtgcacgaggtcgattcggccaccgccgaacctgacctgatgacccaccatgtgtttgaaaccacgcgcggtgacaagcatgagcttgtacgtacgttggcctccggtactggccgtcgtatcctgtttacccgcaccaagttccaggccaagaagctcgccaagaacctgactcagaacggcattccggccgccgaactgcacggcaatttgagccagaaccagcgcgaccgcaatctcgctgccttcgactccggtgatgtgcgcgtcatggtggccaccgacgtggccgcccgtggtattgacgtcggcggcgtggagcttgtggtgcaggtcgagccgccggccgacccgaagtcgttcgtgcaccgctccggtcgtaccgcccgcgctggcaaggccggcgacgtggtcaccctggtgctgccagaacagcgtcgtgaaacgcgccgactgctgaatcaggccggtatcaaaaccaagatgattgaggtcactcacgattcgcccgaagtgcttgagcttgtgggcaaccgagccgagcgcgtggacggctggagtctcgacaagtcgcagcccgtcggcaacccgcgcaagggtaagaataagggtgccaagaacgcggcgagcagcgagtccggccgcggcggcaagcgcaagcgtaaccgcaatcgcaaccgtgacgagcagaacgtcatcgagaccgagtcccggtacgagaccgccggcgatgagttcgctgccgatgacaagtcgcagcgcaagcacggcggcaaggccaacaagaagaaccgcaaccgtgcggaacgccgcgccggcatgagcaaccccgaggccgaacgtcgcgattatctgttcgagcatggcgatgagcgtcgtggcaatcgacgcgaggatcgtgccgacactcgatatgaggatcgccgtgatcgccgtcgcggtaagaaatctgatgaccgttatgatgaccgtcgcggcgataagtactccaagaacggcaagtccgatcggcgagacagattcgattacgatcgaagcgatgagttcggctcgcgtaagcatgaaggcagcaagcgtatccaccgcaagaacgagaaccgcatcgtgcgtgatgagcgttccgagggagccaagcgtcatgagcgccgtatgatcgccaaatacggcaatacacaaggcccgaagcgtcaccattccaagaagaacagctcgccattccgctcgtccggtacccgcaacggacgtcgatgacgttccttggctcccttcagggagggggccaaacgctggttaatattggtacgctacggagccgtcggcgttgcggatggtgaaggtgggagtgtgctcgatgttgaggtccacggtcagggagtgttgcgcgtcggcgctcacggaacgatagatgaagtgcttgttttccagcttcacggcctcggttcgtgcgtcaatcagccatgggttgcggcggcgcagcgcgatcagtgcctgatgcagccggtaggttggctcgcccaatgtggagagctcggcaggggagtcggggaacttcggacggatatcatcatcgccgccgaatcgctcttgcttgacgcccacatagccctgttcgtcgccgtaatagatgctcggcatgccgccgactgtcatcagcactgccagtgccaacgccgccttggccgagcctatctgcgaggcgatgcgcgtcacatcatgattgccgatgaacgtttgtggcacgaaggaatctaggaacgcattgtgccgcttgaggttccaatccagttcgaagaagttctccgtctccagcgcatgctgaatcgacttccacagctcatactgcgtaaccgaatccatcgtggattcctcgacgatgcgcgggtaatcgccatggattacctcgccgaaaatccacgaatacgagtgtgcggccttgacttgcggcaatacacgcgcccagaacgcgctcggcaccgcatacgcagcgtcgagacgccaaccggcggccccacgatcgagccaatagttcatcacgcgggccacatagtcaacggtctcatcggactgatggtcgagtgcaaccagatcgccgtgcccctcgaatacatccaaagcaggctcgccattatcgccaacatgcgtacggaccagaccatgccacgggttatcggccggattcaggcggccggcggcttcgtcaagtgccgcctgaacggccggatgattgcggctcacatgattgaacacgccgtccaatatcatctgcaatcccatatcccggcaagcggcaactagcgtatcgaaagccgcatcaccacccaatcgcacatcgatgtgcatatggtcaagcgtgtcatacccgtgcgttgccgattcgaacaccggccccaacaacaaaccggacgcacccaaatcacgggcatattccaaccaagggattatcgcttcgagaccgcgtccacgaaattcgcgtgggccgttgggtcgaatatcggcaccgcagaagcccagtggatacacgtgccagaacaccccgtacttcacccaatcgggcagctcgcgagccgaatccgtgttgacagccactgtgcacctcctgattgacactgtatccatttttgcacatgcgtgtccgaattcgttgcggcagaccgaagcgcgcaacataacaacaccatataatccgcgcgccacggaaactacgtagccattcttccgctacaatcagtgtgacggcttccgcccccgaagaagaaggtgttgatttctttggacgtttccctggcgaatttcattcagcaggtgttctcgaacccggctctgttcgtgacgacattgctgacactgggggttatcttcgtcaatggatggaccgacgcgcccaatgctatcgccacttgtgtgaccacgcgatgcatgcgcgtacgctctgccgtgatcatggcggccatctttaacttcctcggcgtcttcatcatgacgcagctcaatgcctccgtggcctccaccatcagcaatatggtcgatttcggaggtgatacgaatgcggcattgatcgccttatgcgcggcactgttctccatcgtcgtatacagcgtgggagcctcactgctaggtattccgacttcggaaagccacagtctgattgccggcctgtccggtgcggccatcgccatccagggcggcattggcggcatcaacatgggcgaatgggtcaaggtgctgtacggtctggtggccagccttctgttcggattcgccatcggctggctggtgtgcaaggtcgtgacgctgatctgcgctggcatggaccgtcgccgcaccaacggattctttacgtacgcgcagattgtgggcgcggccgccatgagctttatgcacggcgcgcaggacggccagaaattcatcggcgtgctgtttcttggcatggcgttctgcaacggtcagcccagtgtggtgggcgtgatgatcccggtctggctgatgattctgtgcagcaccattatgggcgtgggtacgtccgtgggcggcgagcgcatcatcaaatccgtgggccaggacatggtcaaactcgagaaataccagggcttctccgccgacctgtcgagcgcactgtgtctgctcgttatgaccgtgctcggcattcccgtctccaccacgcacaccaagaccagcgccattatgggcgtgggcgcggtacgccgcatttccgccatcaacttcggcgtggtgcgcgacatgatgctcacctgggtgttcacgttccccggctgcggtcttatcagcttcgtaatggccaaactgttcatggtcgtgttctagaaaggaatcccctcatcatggcgagacaaaaagatgcgttctactttgacggattccgtcgcagtgcggactacgcatgtcaggccgcgaagctgttgtccgaagtgatgcacgatttcaatcccgatcagctgcgcgagcgcatggacggcatgcatgcgctcgaaaaggccgcagacggggttcgtcatgccatgatggacgagctggtgaccgccttcatcacgccgttcgaccgcgaggatatcgatgagctcggccgtgtgctcgatgacgtgaccgacagcatcgaaggtgtgctcaaccgcatgtactacgacaatgtgaccgatatgcgtgatgacgccgtgcagatgtcggacatggtagtgcgtgccacggaaagcatccgcgaactggtagacgagctgccgcgattcaggcgttccaagacgctgcgtgaactggtgtttgccatcaacaacatcgagacggaggcagatcacctgttcattgaatcaatgcgtacgctgcacaccacctgcaccgatccgctacaggtgttcgcctggcatgacgtgtaccgtcaccttgaacagtgctccgacgactgcgagcgcgtggccaacaccatcgacagcatcgtcatgaagaacagctgaccgaattaccggcactgcacgtagatttattggtgcgcgttcagccatatgatggcgagctgcgtgcggttggtcagtccaagcttgtccaatatcacgctgattcgattgcggacggtgccttcgctcaaaaacagtttggcggcgatgtcgcggttatcaagccccttggcaacgagcatggcgatttcacgttcgcggtcgttcagaagtttggtagcggaatcgttggcatttccggaattgctggaatctgcaggattcgtagtccgttcggtgagtttgccgaggatttccgcaccgagcaccacctgaccggccatgaccgcctgcaatgcagggcccacggcggccacatcctgtttgatgaggtagcctttggcgccaagcgccatcgcctgagcaatgtaatccttatccgcaaacgtggtcaaaaacaggatgcgcgccgccggatccttgggcagaatctcacgcgcggcatccagcccatccttgccgggcatctgaatgtcgatgagcagaatatccgggtgattggccggtgaggcaaaatactgttgcacggcggcaccgccatcattcgccgtccacagcacgtcggccgtaccggtggcggtcagaatcgtctccaatgactggcagacaatcggatcatcatccacgattgcgattctcattgttccctcgattctatggtccaacgctgcttcggcacggatacgaacacgcgccagccgccctcatatggcccgcaaaccgcagtgccgccaagggcacgcacgcgtgattcgatatccgccaaacccatgccgcgcatcagttcatcggccgaaccacgcatgtcggcagcgccatcggcggcgagtcgtgagccgacacgcgtggcgcgcatcgtacgtggctgggttgcggtcgtctgggactcatcagacttgggcatagacggtcccggatcctgaatgaccaactgccagaacgcggggaagtcacgtaacgtcacgctcgcctcatgcgccgcactatggtgcatcacgttcgacaatgcctctcgaatcacggtcgcgaagcagcgtgagaccggcgctggtgccttggcgatatcgttggccagcgtcacggcgaaaccgggggagatgccatcaaatgaggtaacggcatcattgatttgcgcggcgaaatcagtgccatcatcctcaaggtcgtgcactgaccggcgtaccatcgtcatcgcatcatccaaggtcgtgcccaatgtggcgaaaccctgtgcggcgaccgtatcgtttgtcgcctcggccactgttttgccggcctgcgcctgcatgattgcgcgggtcaacagatggcccacattgtcgtggatttcccgggcgatacgtgtgcgttcaccgagtattgccatacgaacggattgggcgcgttcctcatcgatatcggcaatgcgcaaacgattcgaacgagtggactctcgagccatatcctgcgctcgcagcagcgcgcaccgcgccacatccgacgagactcgggcccgtcccaggacgaatccgagcagtgcaaccagcgccatcgccagcgtttggaggtagtcggagccacgggtgaaccaaagcgtgagtagcggcaacacccatatccagcgtacggcggcagggagccatgggactgtgcgcacagcgtcggcaaacgaacgacgagaggccggggattgtgaggcactggggaagcggtcgcttgccgcggctcgggtttcgggtgaggcaacggctggcaaacgtgccatatcgtaggcgatgagcggcatgaacgcacaccatgacggcaccgtcacagcgatggcgagaaacgccgcgcacaatacccaagaccattgcgcagcggggcgcagccattccaccaatccggcgatggacacagccagcaacaggccggcgatgaagaagccatcgaaccgcgttccaacgagcaaagccagtgtcgggcctaacacgagcagcgagaccttttcggccaacacacgcatggcacctccctggcttgatgctcttccacccaccagtctagcggtgtgtggaacacaacgaacttgccaggcatgcgggattattcacgtaccggttccgcggtataggcttgcaggccgccgaaatccccaatctggtgttcgccggcacctcagtggcacaaggcaacggccgggcggtggtaattcacacaggcatgatcaccagattcgataaaatcgcgcgtctgacacagaatgtggaagacaatgttagttcattgcagcgcgaattcaaccatctgacccggcaaatcaccatcttcgccctatgcatcggtgtcgtgttcttcattctggacgtgctattcgtgcataatccattggccgaaacattcatcttcttcctcggcatggtggtggctttcatcctcgaagggctgctgcccaccgtgacccgggcgctcgccgtggccgtgcagcgcatgagcaaacgcaatgcactggtcaagaagctttccagcgtggaatccttgggttccacctcggtggtctgcaccgacaaaaccggcacgctgacccgcaacgagatgactgtcgaatacttgtggaccctgaaccacgagtatcaggtaagcggcaccggatacgcgccgaaaggcgagatcacggtcgacggggctgtgcaccatgccgccgacgatgcggtattgcgcgagctggttactgggggagcgctctgctccaacgcgcacctacacgaatccaaaccggaccatgacgtgcgcgacgatcacatgccctccgccaacggccgttggcaagtgtatggcgatccgaccgaaatcgtgctgctggtgctcatcaccgaagtaccgattctgcagaccgtgttccacaccgcaccactgagttggggcgaatacctctacctctgctgcatcccgttcgtgattctcgccatcgaagagctccgcaaattcatctggcggcatcgtttcccgactgggttggtatagcgatatagcgaaattggcccccgccagagggggcagtattgacggaataatgacaaatgtcacgcccgcacggccgagttgtgacttttgtctgtggcggcggccgaccctttctcgggatgatggaatcaccaaggaagggagtggctatggcaaccgacaacagagcttccgaacacgactcgacaaccaacccggctctggccgtgcacgtcagccaactggtcaaacgctacggcgacatggtggcgctcgactactttgaccttgacgtgaaccagggcgagattttcggcctgcttgggccgaacgggtccggcaaaaccactgcgatcaactgcatcctcgcattgctcacctacgattcgggcacgattcgcgtattcggccagccgatgacgccgacctcatacgcgctgaagcgccgtatcggcatcgtgccgcagaacgtggccgtattcaacgaactgaccgtcaccgaaaacatcgactacttctgctcgctgtacgtgccgaagaaaactgaccgcgcgccgctggtcgaggagtccatcgaattcgtcggactccaggacttccgcaagttccggcccggcaaactgtccggcggtctgctgcgacgcctgaacatcgcctgcggcatcgcgcacaagcctgacctgatcttcttcgacgaacccacggtcgccgtcgacccgcaaagccgcaattcgattctggaaggcatccagcggctcaaccaggccggcgccacggtgatttacaccagccactacatggaggaggtcgagcagatctgcgaccgcatcctcatcatggaccacggccggcacctggcgctcggaaccgccgacgagctcaagaacatgatcgacacgggcgagcgcatcaccatcgaaacgctcgatctggcggattcggcgatggccgaggtccgtgcgctgccgtgcgtgatcgaagccacctacgacggcaaggaactcgacgtgcgatgccgtcgcggcgaacacaacctgaccgacgtgctcgacgcggtgaaacgctccggcgccaacatcggccacctgaccagtcgcccgcccaccctcaatgacgtattcctggaactcaccggcaaggcgctaagggactaacaatcttgcccccgctagcggggctcccgcgaagcgagtgggggtggccttgcaacaaccaccctcagtcggcttcgccgacagctcccgtcagcgggagcaggtaaggagacatcatgtggaccacatttctggtcgcattgaaagcgaacttgcgcaaccggtcggcgttgttctggatgaccgtgttcccgatcgtgctggcgaccatgttcaacggactgttcggcgggctggccgaagcatatgaactcaagccggtgccgatggccgtcatcgaagacacccgttggcagcaggcggacggtgcccgcaccttcgtagacgcgctggccggggaaacggaatcggcctcagacgacacgacctacgccggaatcgaccaaaagctgctgaccatcaccacagtcggcaccgtgaaggaggccgaacaacggctcgccgacggcactgccaacggctatctgaccgccgacaataacggccgattggcgatgaccgtgagccgggaaaccgccgtcacagccaaagactccacgcaaaacagcggactggacattagcctcgcggccctgcgcggcgtcatcgacctgtacaaccgcaccgacgccgtcacccggcagaccatcgccgacaatccacaggccgcgctcagccggaacttctggaacagcgtcgggcagaacgtcgacatgacccatgagacgacgctcacgcatttccagcctgacgcgatcgcccgatactattacgcgctgctggccatgtcctgcatgatggccatgggatactccatcagcacagtcgccgccgcacaggcgaacctgtccgcgctgggcatacggcggaccgtagcgccgctgagccgggccaaacagctcgtcgcgggcttcctctcctgctggctgtgctcgtcggtcgccctgtccatcgcattggcctatatccggctcgcctgcaacgtctcgctcggcggacgcgaaccggcagcgattttcgcggtcatcatcgcctcgttcatgaccagctcagcaggcaccctgctcggcgcggtaccgaagctttcctacgacacgaaatacggtttgtcgagcggaatcgcctgcatattgtcgctgttcaccggactgtacggcggcttcgccatgcagatcagtgactggatagcacgcaacgcgcccatcctcggcaccatcaaccccgcgcaacaggtgacgaacctgttttacgacattttgtactacgacagctaccagccgttcatcaccacttgtgccattttgctggcgatgagcgcggtattcctcttggctggcatcgcaatgctgaggaggcaacgctatgaacacctgtaaagccacattgcgtgtactgttctcgcacagggcctacctgttgatttacctcgtgttcgtgggcatcatgatgctgtctatcagctggtcgatgctgtctggcacatccgattccgcagccgcggcatttgagccggccaaaatgcgtgtcgccgtcatcgatcgagactcggacaggggcggaatcgcgtcatcgatgcgcacgtacctgtcggattccagcgaactggtgaacgttgacgatgctagtgaaactctgcaacaagccgtcgcctcgaactgggtggatctgattgtcatcatccccgatggtttcgccgacgatttcattgatgccgcggcgacaggcgagaatccaccaagcgtggacacggtcaccagctatacgtccggcgcaggctcgatggcccggatgaacgtcatcgggttcctttcactcacgcgtacggcactgattggctcgcatacgacggtcgatagtgcggcgctcgcagctatggccggtatcgacattggagacactgcgggtgattcgtctgaagatggcatgggcgggtttggtgaattctcgaatcaggacatgcttgatatgctgccggccggtcagattgagaaacccagcgtcggcgatctgttcgaggcatcgaaagcggctgccgcatcggcgagtgacatggacgcgaaccataaggtcgctgtgatcgacacggcaagcgcggacgcggaaagtgcttcggacatggcggccagcggattcggcaacaccatgaaaaccgcgctgcatccgctgtttttggcgatgaccgtctgcggatcaatgattctgggcacattcaccaccggggaggttcgccgtcgtctcaccgcatccccgcaacgtatgtcgtcgatgggactccagcggttgctgacgttgggcggattcgcgctcgtcgtatgcgtcggttatctggtgctggcggtcggtctgatggtcgcggcaggacttgatccgttgacattgagcgccgaaggagtgctgatgacgttctgcgcaacctgcgtatatgcgctgatgaccgtcgcctgtggattcatgctcagcgaattcgggttttcggaggcggctgccaatggattcgccaatatcttcggcctgctcatcatgttcacgtcgggagttgcgttgccgatcgacatgatgcccgccgtgatggtgactatggccaagttcctgcctggctggtggtattgccgagcaatcgacaatgcgctcggcttcggcacggcggaggaaaccggcataagcgtcgccggctgggccggctcgctgggattggtcgcactgttcggcgtgatgttcatctgcatcggcctggccgccggccggttccgccgctcccgccccgccctggccgcgcccgccaccacgcagctggccgagtgagaaatcagcctttcaaccgataccgctgcaccgggtcatcggcgaacttgactcgggcgacccgcccttccttcatcagctcgcgcatgccggacgtggcggccagcggagtcaactgcagttcgcgcatgatctccttgacgctcatcgccgaatgccgctccagtacggtcataatcgccttgaccacgtcgcccggcgaactgttcgccatcgtgcgttgcttggtgatggtcatcgtgaacgtgttgatgtcgttgcgcgtggtcgccggctcgatgccggcctcgcgcaacgcggcggcgatgcgctggtagccgtcgccgccttctgggttcacaaacccgccgcccggatacggcgtggactccagcagcgtgaacaggaactggtttcgggtggagacgaacggcgcgcccgtcaccggatgcggactcgccagcacatcatgtgtcaccatgccgtacaggccacccggattggtgatctcgatgcgatcggtgaacacgctgatatgcacctgcgtgccgcgcgcatcgggcgaataatcacggtgggtgagcgcgttcgcaatcgcctcgcgcaacacgagtggcggataatcgggcttcttcgcgccaatccaacgcatcagcgagtcgaccgcatcgtcgatcatcaccggaatcgaaccgaccaccgacttcgaggcgaccaatcgttcgtcgccccggaacacatcgtcccggctcgtccccggaaacacggctatcgaaatgccgagccgcggatagaacttctgcggatagcggcccaacgccagcagtccggccaaggtggggcgcagtattccgccgacctccgactcgtcggaatcatcatggcgcaacacctgcagatccagcagcacgtcgatgccgtcccggtcggcgaacacgcgcggatgctgttcgcgcacgcgcgccaacaatccggaaacgagctgcgggtcgaggtcatcggtcgtggcgccgggcacgatatccagatcgtatgtgggctgcagatgctcctcgatgagccggtcgacctcataggaggtcatgcgccggtcgccgtcgccggtgcggatgaacgagccgccgtgcggtccgagcgcggtggtgaagcagggcttatcgcgcggcagcatttcgtcgatgcgcgcgaacaccagattcgcgccttcgaacgggcaggtgacgatcacgggccgcaccaccggcgtcatcttctcgcacgcctggctcagcgcctcctgcatggcgcgcgcgtcgaatccctcgaccggcgtgaacccgttcttttcggacaggccaaggatgatccagccgccggagccgttggagaacgcggacagcgtatcggtgatggtcgaggagatcttgcgcttgcattccttgacctcgcactgctgcgtatcgttgccgatcagacgcatgagttcgatcagctcagtcattttggcagtatagtcatcgaccatggcggcctccttgacaccattgtgccccataatccgccgcccgctcgcctccagccccgccggttcaccccaattcatccagaattcatgggttactggtcaaagtacgaatgattgccgagaggctgtcgtatatgcgcaatagcggctgcaaactgtgttgcgccagagcgttcaagtcttttagcaaagtcgggaatgtttatcggtggccgatgtcgagaatcgataagctcacgtatggcgctagctgtggcttccggatttcgtctaagtaatacacagagcaaatcatccggcgtgatgacctgaatggagaaagagtcaagcagtttctggggaaaatccttgatattgcgcgtggccagtgcgtctgcttgtccctgtgccgcagccgcaagtacgtgacgatcatccgggtcaggcagatcgaattggctccattccgattcctcaacatgtatggaggattcggggaatgcctggtccatcattatcagtctttttcggaaggcttgttgtgcggcgtcaggcagtgttcgggaggcggcttcctgtgcttcttgtaatacgttaggcgaccacaggggaagaaaaaggtcatgctcggccaaggtgagcagaacatcggtcaaggtgatggaatagatgacattggcatcaagaaacaccgacagcatcggcccgtactctccttacctccgataccgcatgcatggcttcctgcggggtcggctcgggcaggtcgtacaattcggcgtcttccccgacgccgatcatttggctcagggcacaatccttggtgtgtttcgaggctcgcttgtattcaagcaggtcttccagccggatgcgacggtgattggacggacgtgaaaaaggaataagtcctttatcaagcagtcttatcagtgtttgccgcgaaatgccgagcattgccgccgcctgttcggtagtcagatcttgttcggtggcactgatcattacacttttgccttcggcgagaaggatggccgtctgcctgacggcgtcgcaaagctgcgaaggtaggggagtctccacgccgctggcatctttgatgaagatccgctcatcaagaaatcgtgcggtgaatgcctccaatgtcgtcatgtcgtcaatgttgatggatggaaggattgttcgtggaatggtgagtttgtcggattctgccatggtgacctccctttttatctatcacagtataaaacgtccaaagcgaccaaaacacctaaaacgttcaaattatgcgaattgacgatggttatcgagttttcgaatatgggttgctactggccgctaacgaggtcgaggagggcggactatgttgggtggcgtggacggccagtcgaaaggcattatgccgctgcttgccgcgcgcgtcgccaagcgtaccggtcggccggtggcctggcgtacggtcggcaagctcggcgcgaccgctcgacgtgtgcgctaccggatgatcggcgatatcaatgaccggccggatgtgctgatcgtgtgcgtgggcggcaacgacatgctcgccggccgttcggtgcgcgaatgggccgcaggcctcgcgccggtgctggacgcggccaagaacaaggccggcaaggtgatgctgttcagctccgggcagccgcatcgcagcccggttctgccgcgcgctgcgccgcgacatcgaacgccgcatcagcgcgcagaccgccatgagccggcgactgtgcgagacgcgcgacatcgccttcctcgacctgacccataccgataaggtcgacccgaagcgattctgggccgtcgacggcttccgccccggcaccttcggctacgtggtcatggccgacgccatcatgcgtctgctgtttgacgtcgccaaggaatgatgagaataccgggtcatgcgatgaatcgcaaataggtgcggtcatcgaacgaatcgttgcccggcgtaaaacctttggtggactgatattcgctgatgagttccgggtcctcgcgtttgagccggcgcagctcccgttcggattgcgcgagcgatggccgaagcaggggatagccgtccgacgcaagtaccacttcatcgcccggattaatattcacggtgcgaatcggatacgtcggatcagtgaacccgtcgaacacgaaatacccgtacggaccacgcttgttggcgaactgcgattgcaggcgtagaaacggcagaatcatcgcgcgagccgggtctgtagcggcagcggcaggcgattggtgctcgcccttgctccgcaacgccagcgcagtgagcgcgcgcaactcgccaagcagctcatcgacatgtttgacggtcgggatctgctcgccattgaccatgatctggcagtcgccgaacagccaggcctcatggcggtcggcgctatacaccactgcattggcctgcagtcgctccacgggttcatcggtgaaaacggcggtgtccgcaccgtgctcgctgtgggcttgccggaatcgcccgtcgatcgcttgttgtgtttgccgcatatccgcgtcggccggcaatccggcaatgacctctagcgccagatccttggccatcacgccaccactcggctgccacagatggcgcacgcttttgctggtcgctccatccaccaccgctgcgaaatcgtcggtgatgatcagcccgtcctcgttcagcgactgatcggtccgcttaccttggcagtgctgttcgatgattcgcatagtggcctcctctgattctcactgtagaccggtttacaaaccatcgaaatggtgggtatgctgttgcggcggatatgttggggtttgctcgtgggggattggtatgcgcggattgtcggtattgagcagggcgttgcgatgggcgttggtgggtatgacgttttcgatgctgtccaacgcgattttcgaggggtcggtgattccttcgattctgatcgtcggactgccggcatgggtgatcgcgttccgcaagacgtccaatctggtcatcgacttcgcttctccgatgtccgcatggatcgtgcagcggttcggctcgttccgttcgcttgcgaccacggagggcgtggaaggcgtactgtgcctggcggtcgcgctggtgcccaacggttggacgtattggaagtggctgctgctggccctgtcatgcctgttgctgatgaccgggcaggtcatcgacgtggcctccgaagtgttcgaggtggatgcggccggcgacgacgatgacatgctcgtcaagtacagcggctacgtcgccgtgattgccagcgtggccggtacgttgctgggccaggttgccggatcggccttggctaacgcctccatcatggccatgctgctcacctcgtcggcactgtcatttgcctgcgcgctgacgcgattccgcacccgcgagttcatgccgggattcggcaacgatggtgcgggcggcgatgacggcgacggctccgccgacgaatccacggcggccgacacgtcacacgcgccgcagcgcactccggtcacccgcttgacccgggtcagactgctgatcgcatcgctgctgcttgcgctgattccgtcgctgtgggcaagctatgcgttgctgggcatcggctcccggtacggcagcgatatgctgaccgtggtctacgcattcggcggcgtgggcagcatcatcggatcgtttgtctacatgcggctctccgcaaaactcggcatgcgcgccgtgtccgccatcggggcaatcgccacggcgatttcccttgccgccgtactggttcccgagtttgccgcggtgtgcgtcggatggctcatcaacaacctcggctatggcctgctggcgcatggcgtgatcgtatcgcgacaactgctgctgagcggtggtgacctggccaaattcagcggccgtgccaggttcgcgtatgcgatcggcggtgccgtcggcacgtggggcggctggctcggctccgcccactggcagatactcgccgtcgttgccctggtactgtgcgccggattcatcccgttgctcaaggccatgcctggcccggtacggcactgaggtgacggatggggccggctggcatctcgtgcgccgggcgtttttcggcagattttgccgtgctgatgtacgcaggtgttgacgttcggcgaggttcccaaccacattgctgtgtgattgatgccgctcgataggcatgtcagcccggacacaccacggcgatgccgaatgggcgacgggccgacggcccgcatcatcgcagcaaccgggttttgccatccttgacgagcagggcctgccggttggtgaggggcttgagactgagatcggcgccatgccggtcgagaatgcgttgtgcggcgtgacccatggccgctgcatgatggtgggggaccacgtggaaatcggccaggcccaatcctgtgtaatcggtgagatcgggggctttgtccgtgcgatccatgagcttgatgtagccgatgttgggcgccgtgatgaccgagcctgcggactcgccgatgtacggcgtgccggcgcgcacctgattgatgatggcccggtcggcaccggtgcggcgcaactcctgcaagagaaagaacgtgttgccgccgcccacatagatgcaatcagcctcggtgattttgtgggtgatgtcctcggcggagtcgctcggcatgttttccacatccagttgttcgacctcgaagccgagccgttgtagcgcgtgtttgctcaatgccgtatgagccggtccccacggttccacagcgctcgccgttggaatgaagacgacccgtttgccctgtgaccgcggctcgatttcatgcacggtgggcgagacgttatggaacatcgaagtcagcagcatcgtaaccataagcgccttccttacacatcgactatgcggcagtgtaagtcctgaatatgtggaaacagctatgcgttcgctgcgggtatatccgaatcgatcagcgcaatgccggctgccgccatctgtttgcgggccgcaacgccaagctcctcgctgaccggtacggtcaggtcctcgaacacggtgacctcgaaaccgagcttcctggcatcgagcgcggtgtccttgacgcaatgcgattcggcgatgcccaccacatccacgcgactcacgccggccgtcttcagcgcgtcggctagtgtcttgccggcggcctgttcagccgagacctcctcacgggtctggatgcggtcagtattgtcctcgataccctcaaacccggaatatgccgccgaatactgtcccttcttgaaatgatgctcgacgcccagcgccttgatcgccggatgcagttcggcgttcgacgtaccggccgcgccatgcttcggccatgtatccacgaaatccggctcagccgaccagtgcgcgcctggctcgatatgccaatcctgcgtggtggcgatatacgcgtattcgccacgatgcgcattcacataatcggcgatacgctcggcgaccgcgttgccaccttcaacacccagctcaccgccctcgcaaaatgtcggctgcacatccaccacaatcaacgccttgctcatagattccccatttcttttgaataggcctgtaatgtgcttttatcttagtggtttattgctgaataggggagtgccggattcgtcaaaagttagacgtttgattgcctgattagaccaatgtgacggtgatggtctgctcgacggtttcggttcctgtccaaacaccatctttgcgattccattccatgccgttcgcatgcaatgcgtcgatgccgtattggcgggcgtgcgtgaccagccagcccgtaacttgccagcacaggcgattatggtcgtctgcggacaggccgtcgggcagagccacggtgattgtcgtaccgtttgatgaattattaccgtttccctcggcagttgcaggcgcagtagcggcggtaacactcggataggcaacaggaagcgcagcgataagcccatcggcatccgacgatgttgccggctccagcgcgcatgaaatagtcgctccgaattcaccggtcagtcccgcagcccaagcgtgtgccatggcgtcccatgtggcgtacagatccgggtatcctgaacgctgcacttcctgggccgcgtcctcgatgggaatcgtctcccagtccggcacctgcatcagatggtcgtagaagatgttcgtggcatacgtcatgtcggacacctgttccacggttccccaaccttggctcggccgctgttggaagagtccgatggaatccagatcaccataggaaaggttcgtgattcgcgattcctgcatggccgtggcgatggccaccgtcgccgcatgatccggcagtccgcgattgatggcgatgttggcgatgagctccgcgttctgggcctgttccggcatgagagaatagcttgggccgtcggctagtttcgccgagcaataggcgtcgtcggaggcgcgggaaggggtgccggaggaaaagaaaatgcgtggcagatagatgagcgcggccagaatcgcgacgatgacgcaagcgacgataaacaccagcacccatctgccgcccgagcggcgacgagcccggtatcgcgttcgccgaaccatctcgcctccttccgggccttatcggtcttcgcctgattgcgcgtctgtgtcatatcgtcacgtcaatctgatcaccaccagtcagagtgtcatatctgcctgatgaatgctcatagcaccgatgactttgccataattcttcacgccttttgactctcgcacaagccgaaccgagaaggatgttccaatgtccgtgtttcagcgtggccaagattgataatctgggttgcaatcgtctatttccgcttcgaggggctgatgcgccatttccagaacatctacttccgtttcaaggggcggatggttaagtagacagatcatgaaaatggcgggatggcgttgttgttacgccgtttctacttttggtttgagcttcgaccagcccctcgaagtggaagtagatgttcccggataacagaatcagccccttgaaaccgagaatgccgttcgaaactgtttcggcggcgaaggaaccgtagacgctattgtgtgaaatacacccagtcccggtttgagagaggaatgtatggcacagccgcagccgtattacgccatcgagggcaatgataatggattgtccgtcgtgtttgtgcatggcatgggtgtggaccatcgttcgctgatgatgctcgatgaagcattcgacggcaatgattcgattcgccgcatatatctggacctgcccggctttgggcgtacgccggcactgcccgagaatgcctgtggactgccggaaatggctgattggctgcaaacggtcattgacggccttgtcggcaaagcaaccccattcgccatggtcggcaactcgatgggcggtgcgcttgtccgtgaagtattggcgcgcgaacctcgccgagtggccggcatggcgctgatcgcgccggttgtggacccgcagcatgccggccggcatgtggccgaacacgtggttgcgaatcccaatcccagactgacgcactccctgccacaggaacaggtgttcgacttcattaccatgggcgtcaaccagtcattcgatgcatggcggcgctaccagcggttcatcttgcctggtgtggcgttgtgtgaccgtgcggcgtgcgaacgactggatcaacgctattggctggatgacgaccccgaggaaacgctcggcacatatgcaggtccggtgctcatcgtcaccggcaaacaagaccagatcgtcggatacgaagaccagcaagccctgttgccgcactatcccaacgccaccttcgtgacgttagacaatgccggtcacaacgcgcacatcgatcaacccgaagccgtcatcacgcttgtacgcgaatgggtggctcatatggcgttcgctccgttgagctgacggtctgccgaagcctatatgtatacgagcgaccaatgccagttgacgcaatacaccttgcatggtatatcgtttttcgatatagtcatatcgatgttcgcggtgtcgtcaaaaacgtcggcacctgaaaggaccgggctatgaaaaactacatgaaccgatgggtgttgctcgcgttgaaagccatcgtgattctggtctggctggcctgcctatggggccaactactcgctgtaccgggattgagcggcgcgctggccggcctctacccgagccagacgtcgatgcactggccatatctcattatgggcgtgctgttcctgctctgcatcgaagcggcgttcgtggccgtatggaaactgttctccttgtccggctcaggagcgaactcgagcaggtgatttgagatgacgattcgcatcaatctcgacgtcatgatggccaaacgcaagattggcgtcggcgagctcgccgaacaaattggcatcacgcccgccaacgtgtccattctgaagaacggacgtgccaaagccgtccgcttcaccacattggacgccatctgcaaggcgctcgactgtcaacccggagacatcctcgaatgggaagatgacgattgatcgacacgccaccggctcgaactcatggttcaacttgtagtctctcccaaaatcaatgatgccctatcatcctgcaagacgatagggcatcatcatgtgattatgcgcagctgatatgtcgcgttgttatcactcggcgtccgcggccggtgcctccttgggcgcggagaggaaatgctcctcactgggcagcacggcgttcaggatcacggccaccacgaacgccacggcgatgcagttcgaggcgaagatctgctggaacagggccgggaactgcgcgaagatgtcgctcacctgggtgaagccgatgccgatggtcagcgagagcgccgcaatcgtgatattgcgctgcgtgaagcccgcttcggcaatcatctggaagccggaaagaatgatattgccgaacatcatgatggtgcagccgccgagcaccgcctgcggcagcgagttgaacacctcggcgatggccggcacgaagctcgccaaaatcaggattacgccaccggaaagaatgaccttacgattgacaaccttggtcatggccacgagtccgatgttctgcgcgaaggaggtcagcggcaggcagccgaacaggccggagacggtggagataaggccgtcaccggcgatggcgccagcagtctcgcgttcggtcggcgtacggttcagacccactttggtcagcgcggcggtgtcgcccagcacctcaacagaggagacgacatagagcaggccgatggagatgatcgaaccccagtcgaactcgggcttgaatggcatgatctgcggcacggacacaatggcaaggttctggaaaccggagaaatcgaccttgcccatgcagatggccaccacgtaaccgaccaccagaccgaatagcacggacagctgcttggccgtgcccttcatcaacagctggaatgccaagcaggcgaccaaagatataagcccgagcgtcagattttgccagttgccgaagtccttggcgccactgccgccgccgaagctcgtggcacccacgttgagcagcgagaaaccaatagaggtgaccacgatggcggagacgattggcggcacgaaccgacgccaatatttggccgtcaagcccagcacgagttccagcagaccgccgaccatcaccgcgccgaccaccgcgccatagcccttgtccgcgcaaatcgccacggcggccgccacgtaggtgaaggagatgccggtgaccatcggtagccgggagccgatgagccacgcgccatacagttgcagacaggtaccgagacctgccaccagcagaccggactgaatgattgtggccgactgggccggcgtcatcttcgcggcggatgcgacgatgaagatcggggcaagattggccacgaacatggccatcacatgctgcaggccgaacggaatgcccttccagaaggatacgggcgcgtccagcgaggacaatgcctcaaatgatatggaattcttggttttcttctctgacatgattctcttttctctgttccctttttgtttgctcccgctggcgggagctggcggcgtagccgactgagggtggtctgcggtcaagatgaaccaccctcagtcactgtcgtgacagctcccgccagcgggagcgggcaatagtcctcagtgcctaaaggtgatctcgccggttccgggatccatggattcgacaatggccaacgaatctacgtcgtaaccatcggcgcgcagcgcgtcgccgccgccctggaagcccttctccacggcgataccaatgccctcgaccgtggcgccggccgccttgcacagatcaatcaggccgcgcagcgccttgccgttggccaggaaatcgtcgatcagcagcacatggtcgcccgcattcagatacttcttggccacgatcaccggaaattccttctgcttggtgaaggaatacacggtggtggtgtactggtcgccgtccagattgatggactgcgctttcttggcgaacaccaccggcacattgccgaaatgctgggcggccacgcatgcgatgccaatgccggacgcttcgatggtcagaattttggtgatgtgcttgccggcgaaatgcttggcccacgcggctcccatacggtcgaacagacgtacgtcgcactggtggttcaggaacgcgtccaccttgagcacgtcaccttcctttaccgttccctcgctctggattcgttcctcaagttcctgcatcggacctcctgtcatcgtgtgccacaaccgatatggatgatatggatatctgcaagtgtacgttgtccgatgcgaggggcggtgcggcggcggttcttcgccacatgatgagccggctgccggaacaccaggagcccgtgacaattcgggtgccagacgcccacccccgagccggttcttcagctgccgctgacccgtgcatgtggtaaacatgattgtcgcgattcaaagggaggcaacagtgtacgacgagccggaagtcatcgcccgcagcgcgcaggaactcgtaggcgacctgaacccgcagcaggccgaagccgtgcaataccgcggccaggcgctactgatcggagccggcgccggttccggcaaaacccgagtcctcacccgacgcatcgcatggatcctgagccagttcggcgcatggcccagccagattctggccatcaccttcaccaacaaggccgccgccgagatgcgtgaacgactcggctcgctgattggcccggtggcccagcgtatgtgggtctccaccttccactccgcctgcgtgcgcatcctgcgccgcgacggcaaatccatcggcctcaaatccggcttctccatctacgattccgccgactccgagcgactcgtcaagatcatcgccaccgaattcaacctcgatatcaagcgctacaccccgcgttcgatcctcggccacatctccgacctgaaaaacaacctgaccggctggaaggaaaacctcgccgtccatgcgcccgacttcacgcccggccagcgcggctaccagttcggcgcagtgggtgaccttgaagccatctacgcggtgatatacgccgaatacgagcacaggctcgccctggccaacgccgtcgacttcgatgatctgattgggcgcacggtcgaactgctgcgtaccgacccggccgtcgccgagtactaccatcaccgtttccgctacattctggtcgacgagtatcaggacaccaaccacgcccagtatgtgctcgtacgcgagctggccggcgtggacacaggggagaaggccattccgggtgcgccgaacgccggcaaggcgggccctgcttggatcaccgtcgtgggcgattccgaccagtccatctatgccttccgcggcgccgacatccgcaacatccaggatttcgaacaggacttcccgaacgccaagaccatcatgctcgaacagaactatcgttcgacgcagaccattttggacgctgccaacgcggtgatcagcaacaacgagggacgcaagcccaagaaactgtggacagcactcggcaaaggcgagccaatcgtcggctacgcggcggataacgcccagcaggaggcccagtgggtggccaccgaaatcgcccgactgcacgccgaagaagatatcgcctactctgacatggcgattatgtatcgcgccaacgcgcagtcccgctcgctcgaagaggcgttaatcaacgcagggctgccgtaccagctcgtcggcggcaccaagttctacgaacgccgtgaaatcaaggacgcgctggcctacctgcaggcgctggtcaacccggatgatgacgtgaacctgcgtcgaattttgaacgtgcccaagcgcgggctcggcgatcgcgccgagggcatcctgctcgcctatgcgcgcgaacgtggcaccagcttcttctacgcactcatgcatttggatgaaattcaggacgtgcccacacgtaccgccacgcagctcaaggccttccgtgatttgatgggtgagctctcgcaattcacgcgagcacatgacgccaagcccagcgagattgtggccgaagtgctggagaagtccggcttgcgtgcagagctggaaaagtccgtggacccgcaggacgcctcccgtttggaaaacctctcccagctgcagtccaccgcagccgagttcgagcagaacacgcccgacgccacgctatccgcattcctggagaccaccgcgctcgtggccgattccgaccagctgcccggcgaggcggaggattccggcaaagtgacgctgatgaccctgcacaccgccaaaggcctcgaatacccggtggtgttcctgaccggcatggaacagggcacgttcccgcattcgcgttcgatggaggacaccaccgaactgcaggaggaacgccgacttgcctatgtgggcatcacccgcgccaagcagcgcctgtatgtcacgcgcgcagccgtacgctcccagtgggggcaggccgccgacatgatgcccagccagttcctcgacgagatccccgattcgctcatcgattggaaacgccgcgaggccggcgtggaacgcatgcgcgccaactgggaatccgatggattcgccgacgattacggcggctgggatgatgacgattttggcggtacgacgttcggtgggtcctcgacattcggctctcgcggttcgggttcgtcgtatggctcgagatctcattacggctcgtcaagctatgggtctggctcgtcctatggctcccgctcgggcggttcatcgtatggctcacgttccggctcctcctacggttcccgctcgcgctcgggctcgtcctatggttcgggttccggctcttcatatggttctcgttcccgttccagttcggcgtccggcggcactcgtggcggcaaggtcactacgcgccacaccacgccgaagtccggttccgccggatcttccatgccaagttccaagctcgctaaagataatggactgaatatctctgactttgctgtgggcgacatgatcagccacgatcagtacggtctcggcaaggtcaccgacgcgcaggacaagggccgcaattcggtcatcaccgtggacttcgggtcagccggcgtcaaacgcctcatgctccgcgtggcaccgatcgaaaagctgtgagctgaaaacgcataccagataatttcataaaaaacaagacttgtgttcctcatcacactgtggccataatgcggaggttgtgctcacgaaaccctggtagcaggggagaggaaggaagttatgaagaacaagctgttcgcatccgtgcccaatattctgttcggtgcgcttattgccatcgcaccccagacctttgctcacgcttgctccggccatgacatgccaggcgcctgccattactcgcagcaggccgccaccggcatcggcgtcgtggttcttgtgctcggcgtcgtggccctgttcgtcaacgtccagattcgtattggcctcaacatcgccgccatcgctaacgcgttgctgctgcttgctgtgcccaccttcctgatcggcatctgcaagggcgctatgatgcactgccgcatggtgatgctgcccacgcttatcgtgctcggcgtactcactctcgtattcgccgccatcgccatctggctcgattcccgagcggccaagcactgaacttgacctcgtgcgaccggggcccgatttcattccaggagtcgggttccggtctcgcttattgcaaccgcaccataatcaataaggacccccatcgtgccatcgcatatcgcattgcgcggcctgccgcttgaaaatctcaagcgcaagccattccgcaccggcgctctgctcgccgtcgtcaccattcttgcgctgactttcttcggcggcaccatgctgaccatgaacctcaacaccggtatgaccagcatggagaagcgcctcggcgccgacctgatggttgtgcctcagaacaccgcgcagaaagccgaagcgctgttgaccaacggcaaccccagcacgttctatttcaccagagacatcgccactgaggtcaagcaagcggatggcatcgaacaagccagcgaacaaacctacatatcgtcactggccgccgcctgctgcgacgaaaaactgcagatcatcggctacgacccgtccaccgacttcgttatcgagccatgggttgcctcccaattcaaaggcaccctcgaagacggcaagatgatcgccggcgcgaacgtgaatgtgtccgccgatggcaccattgagctatacggccgtaaatggccggtggtcgctcagctggccaataccggcaccagcctcgacaattcggtgttcatcaaccaggccaccgtgcccgacatggtcgccgcatcgtccaaggtctccaagcaggtcatgcccatggaatatgcgggcaaggccgtctccaccgtgatgatcaaggtcaagcaggggtatgaggcgcaaaccgtggccgagaacatcaaacgcattgactcccgattcgccgatctgggctacgtgtatcctggcggcatcaccgccaataccaagacctcgctgaccgcattggtcacctacctcaaggtgttcgtggccgtgatctgggtgatgggtgtgatcgtgctgctcgccgtattcgcctcttcggtgaacgaacgcaagcgcgagttcgcgtccctgcgcattatgggagccacgcgtggcatgttgaacgtcatcattctcaaggaatcggccattatcggactgactggcggtgtaatcggcgtaggcgtggcgagcctcgtgatcttcccattcagctcgctgatcggcaaacaattgcaattgccatatctgcaagccggaccggccgccgttatcggattcattgccataactattgtgtgctcaaccgctatcggcattgtcggctcgttgctgaccatgtggcggcttggccgccccgaagcctacctgaccctgcgagaaggggagtgacatgaccgaaactgcatctcatctgctggaattggtggatttgacccgccagttcgtccgtcgcggcacgccgtttgacgcggtcagtcacgtcgatctcacgattgacgctggggaattcgtcgccatcgtcggtcgctcaggtaacggtaaaagcaccctgattaatatggtcgccggattggtgcgcccaagttcgggaaccgtgcgtgtggatgggcgcgaagtgactgagctgagcgataaggaactgtccctactgcgcaaccgaaccatcggtttcgtgacccaaagccagaccctgctcggcaatctcacggtgctcgacaatgtgatcctgcccgcgacgatgttcccggatgctctgccgttcatggaggctgagaataaggacgatgcagccgcgcaaaaacagaacaatatggccaagaccgagccttgcatcgaatctgaggccgataacggttccgcatccgatgaaaacagtactgagtcttccaccgagccggatccgtttatgccggatgtcatcgcgccgattgcagatgctgacggtaaaccgtcaaactcagctgcaagccagcccgacttatttaccgagcgcgccaagcatctgctcacccagctcggtgtcgccgatttggcagacagctatccgcgcgaactatccggcggtgagatgcggcgtgtctccatcgcccgcgccctgatgaatcagcccaaattgcttatcgcggacgaaccgaccggcgatctcgaccaagagagcactgacatcgtgatgcaactgctgagaagccaagccgataacggtacggcgattctcatggtcacgcatgatccggatgcgctggagtatgcggacaaggtataccgcatggatgccggagtgctgtccatggctgcagtgtaatattgctcgttggtgtctgccaactggtagataccgtctggagtcatagcccgtcaacgggtcggcggtaggcgatcgcaagaacgccaacccgctcgtgagcaatcacgacgaagcgttggagaggcccgactcagcgcttggaatcgcatgaaaccgagcgttccgttcagataacgacagaaggaataatccaatgacgaacgttcagcgttctcgccgtcaggtgcgcctgtcccgcgccctcggcatcgcactgacccctaaggctcagcgcattttcgaaaagcgtccgtacgctcctggcgagcacggccgtgaccgtcgccgcaccgaatccgattacgcggtgcgtatgcgcgagaagcagcgtctgcgcgctcagtacggcatctccgagaagcagctccgcgccgcttacgagaaggctacccgtaccgccggccagaccggtaacgccatgctgaccgacctcgagacccgtcttgacaacctggttctgcgtgctggcatcgcccgcaccaccgcccaggcccgtcagttcgtggtgcaccgtcacatcctcgttgacggcaacgtggtggatcgcccgtcctaccgcgtcaagcccggccagaccatccaggtgaaggccaagagccagaccatggttccgttccagatcgctgccgaaggcgtgcaccgtgatgtgctgcccgcggttcccggttacctcgacgtgaaccttgcctccctgaaggccaccctgacccgtaagcccgaggtcgaagagattccggtgcaggtcaacatccagtacgtggtcgaattctacgcccgctgattcgggcccccttatctgaaacatcagaatcaaggacataccgcttggaccccgctcccgcaagggacgcggggttctcgcgttctggggtgcgggcgttttcccggagactgaatgaacggaatcacgccgttctgcgcaggaggaatggggcggactttgggcttgagctgcggcgccgggcgctcatctcggtcttgtcacctgcattgtgggtgatctggatgttgttgttgcgatgagtccgttcggcacattgatcgaatatcttctggtctacggatgcgggcaagccatttcctggaaggcgtttcgtcgagattggcgggagcttgcgtcagcaggcgtcgatgaaggcgctgaggatgcgacgttggttgctatcggcgcggtgggagaactcaggatgccattggacggcccagacgaaacgcttggccggcatccagaccgcctccacgatgccgtccggcgcggtggccatcggttccagtccctggcccagcgtgcgaatcgcctgatggtgatagctgttgacgcccagcgtataggcgcgcggatgatacggcttgccgaaggaatcgacctcatcggcctccgcctcactcgggccgttgtctcccagcggccacaacgcacgggccaacggcgaatcgggcgcgatcgacacttcgtggaccaccgggtcatacggcggcttgtcgccatgatgcacgaccgggctgggatgttcgtccgacagatcctgccacagcgtgccacccaaggcgacgttgaggctctggatgccgcggcagatgcccagcaatggcttgtccgccgcgatgacggaggggatcaggcgctcctccatccggtcgcgggccttgcacagtttgaccgtcttggggccggccgtttcgccatatcgttccggatccacgtcgtggccgccggtgaccaggaacccatcgcattggctgaccagctgttcgattgtagtctcgtcgtcggtcagcggcagcatcaccgggataccgccggcttcgatgatgccgtcgaaatagccgggcagcatccacaggctattcagtgtgtcgtcccacaacgggaccacgccgataagcggacgatgggccatcgatacctccaaatacagacttactgataaagcgactcaacttgctacagtctcaaacctgaaaattgtaccactgtgacttgcgggcggagcctactgcatagcttagggaggtagggatttcaatcgagggcggcttatcgctcgtagtgttccaattcggcgagtggatacacctgagtccaatggtgcggctgcaggtcgcgcagcggcacgaacaacggatgctctccctgattgttgtctgaaacggcgcacatcacgtcgtcgccccaatagcgcagccgttcctgacagatgccgcatggagacaacacggtgaacggggcgtgttcgtcatcgcgtacgacgcagatggtgtgggtgacacggcgatcaagcttcatcgcctcgcacatcgctccgacctcgatgcatagcgaagcggcggcattgggtgtctcaatcgccacgctcgtgacgataagtgcctccgagccgttgcttccgtcatgtttaccgttgtctttgccggcgagtcgcatcgctgccgcgcctccccatcctgtcggataccttcgctcgatcagttccacggcactgcgatacagcgcttcctcgatatgacgctccactggagccatatggtcacctcgcgtaatcgacctgccatcggtgggcaggcgggattcaaaccattactagtctaggtggggggagatatccttgacgcatgcttatcgtcgaagtagttgtggccgtggtcgtcggcgtgtttttggtcggggtctatcgtgatgcaaagaacggaacgttgcctttgcagaattcggtaggcatcaaaacgccggcaacaatgtcatccgaagacacatggaatcggattcacaagcagtacgctccgatattcctcgttgatgcatgtgccctgttcctcatcgcccttgaaatcatcattggcggggccatggagaagaacttcaataacatggcatcggaggcattgattgcgttggtggccacgcttgttgtcatggtgctggccaatctggtcgtcgttgttttggcagatcggtctgcacgaaaatgagatagcttggtgagaagccgctatgtcggacttgctgaaacaaccaacttcgcaacggggtaaaaagtaagagagcgacgaatcgggattctcggaggtgttatatgttggatattcaagatgatatcagtagctaccttgccttttcgcactatatcgattggaatgaaccgagtgtgcaaagaaaagccaaggaactaaaagactccactgaaggcgagatcgaactggcaaaagccgcctactattttgttagagatgaaatcaagcattcatgggatgtccaagacaaaagagtcacggcaacagcctcagacgcattaagggagggcgtcggtatttgttgggcaaaatctaatttattggccgccctattaagagcaaatggcattcctgccggaatatgctatcaaaggcttacgttaggcagtacgcctgaaagtggatactgcatccatgccttgaatgccatttatccgagatctattgaccgatggattcgtgtagatgcaagagggaataaagagggtgtacaagcagacttttctgttgacgatgaacgtttggctttccccattcggaaagagtacgatgaggtggattataaaactgtgtatgccgaaccgttgccgcagacaatgagcattcttgaaaatagtacggatgctctatacatgtatctgcattcgctgcccgaaagaatttgacgaattcatttttatcgggaggcaggaggcagcggctggttcggactgccgggtgactacagtcccgcttcaaggttcgtgcggctagccttcgcgaaggactgcatgcccgtgtcggccgacgaggccgacgcgggcatcaagatgctcaacaccttcgccacggtcgacgtgcccatgggcatcatgtacgatccggacgaagcggccccgcattacgagcagacgcaatgcaccatcgtcatgtgcgcggaaagcaaacgctactacttcacctcggcgaccaattcgagggtatgcgtcgtcgatctcgacgaagaaacgtcggagggaacgaccgagctcaaactcatcaagccgcccctgcaacaggacatcctgcaactgaaataatcaaattactttccctttttgaatgaggcggcaatgggcaaaacatgcggactggatttacagattgacattgactggcattctctgaagcccttcaaagcccccgaccgattgtttgcgtcgcgggcagatgcggtaatcagggtggcgttccccgatgccgccgcaatttggcgggcccgcgcctcttcctctctgaattggaaggatggcgtgtgggatgtggtctccacccttatggaagaccggctcggcatgctcatagatgccatcgatggtctgagactcggagggtggattccccggacctattatttattggaacgcaattctgccatggaactcgccgtcgtcacccgtggctctgtgcgtctatacgacgggctcgccggtcccgacatcgccggggaatacactgatggaaacaacgtctatgccaagctataccgggttcgataatccgtctatttgtaagcgcaactcttttttgttcggactgcattagcggttagcggggaacgatccgcccgcgacaacagcccatcacgccaaacttgacaagagtgacgtcggtgacccgtgctgcggcaagcacctcgacagggatggtgacggtatcggttgctctcaggctagtaggcccggatagagttcgttgatcgcccaggcgacgcggccggcatcatatgccgaaagtcttcctgtcgggccgtcgtcgaggaaaagattgcttggcagccgcagcagttgcgagcatcgcacggcgctgggcttgctcagtcccgcgtcctgccagtcacgcagcaccacatagcccggttcgtcgcgccaggtgttgccggtgaccttggtcaccaaggcgatgcgggtgccgtcgtcccattggaggatcacgctgggacggttcttcgctttgcctggcttgtcgggaaaagcgaacggcacccaccatatctcgaactggcgcggatcagtcttcatcatcgtcccaaccctccggcaggatcacggcaccatcacgtatctggggcgtcacgatgcggggatcatccatgttcgctttgaacaggggatatccctcgttgtctttttcgaatgaaggacggacgcttggcgtgaatggcagacgcccgtcgcgtaccaattgtctgagagacatttcgacaaacgtgctcaggttcaaccccatggcgtcaagtatggcgatgccgtcacgcttggtctgcgcatccagactgatcgtggccttctccttgatagccatcattactccttataacagtggtatgacatacgtatatcatacctcaaatcagtcatgtcagctggggccccgttgtctaaatgaaagtgcaacacccgttagattggagattgtccggatagccaaacggaggggtgttgcgccttgggccaggtgtattcgcacctgtcggaagaggaacgccaggtcatccagatctagatgggcaacggggatcctgcgttttagcggactgcggtagcatgggaaccatgattctgcatttgcatctggttcgtcatgggcaaaccacgttcaataaatacaaccgtcttcagggatggtgcaatgcgccgctcaccgcatccggacttgccgatgccgacagggccgggcacaaacttgagggctatgattttgcggcggcatattgttccgatacttctcgcgccgaaatcacagcgaagcgaattctcgatatcaatgaggctgccggacatgcacggccagaactcacggccgatatgcatttccgcgaacaatgctacggatacttcgagggtcaggacatgtcgctggcttggaccgctgcgggtgggcctcacggcgcgaaggactactacgacatcgtagccaaatttggtctggccgcctcccgtgatttcctgaaagaggccgaccccttccatgacgcggaatccgatgaagaatactggacgcgcgtcgaaggagcattccagctcatcgccagcaaccccaatctcaaggatggcgatgatgtgcttcagatttcgcacggtaacacgctgctcagcctcggccaccgtttcggaggccccgatcttgaccttagcgaacgaccggccaacggctcggtaaccgtactcgacttcgacacgaccaaaccgttttcgcaggccgtgaccatcgtctcatacggcaaatagcgtatttcatcgtcagttgcacgggtaaataggggaggagtgctacccttatccgagtaagtgtgacctcaaggaggcaacaatgggagtcggagagatcgcaggcctgattgcggccatcgcgttcgcagtattggccggattcatgatctatccgctaattcggttgggcaagatgttcgaccagatttcgcagaccgtcaaggaatccggtgagcatgccatccccgcattggatgagggcgtgaccaccgtcaagcaggtcaacaagtcgcttgaggatgtcaacaagatttccgctgcggcctccaccaccgccaacaacgtgggtgccctgaccgatttgtatggatccttccttggcaagccggttatcaaggtcgcttcggccttctatgccttgaaggccactggccagtcgttcctggctcagaacgccaacaagaccgctcagaagggggagtgatgttcaaacgcatcttttgggtgggcgtcggtgtggccatcggcgtgatggccgtcaccaaggcacaggcctatgtcaaggccaatacgcctgacgcggcccgtcagttcctgcttggtcccgatcaagacaatgtaccgatgaagacgctcgaaggcctggtcaatgaattcaatgcgacccgtcgagcccgtgaggctgagctcaatcgtcagtacactgagcgcgccaactgacacgcgcacggccttacgcaatcctttaatccatactttccactgatagtggcgcaattgcgcccgaaacaaacctacaaggagttcatccgctcatgcgcactgcggacatcgccaagcgatacctcgattacttcgccaagcacgaccatctcgtcatgccttcggcgtcccttatttctccgaaccccaccacgctgttcaccatcgccggcatggtgccgttcattccctaccttcttggtgagcagaccccgccgaagcgccgcatgacttcgaaccagaagtgcgtgcgcacgctcgacatcgacgaggtcggcaagaccacccgccacggcaccttcttccagatgcttggcaacttctccatcggcgactacttcaaagaagaggccatccactacgcctgggagctgctgaccaccccgcagaaccagggcggctatggctttgacccggaaaagctgtgggtcaccacctttaccgacgacgaggaagcccgttccatctggaagaacgagggctttgatcccgagcacatgcagattttcggcatggaagacaacttctggaccaccggcggccctggccccggtggcccctgctccgaaatctacgtggatcgcggccccgaatacggccgtgatggcggccctgcggccgacgagacgcgctttatcgaaatttgggatctcgtgttcgagaactacgaggtcgacaatgtcaagtccaagaccgacctgcacatcgtcggcgagctggcccagaagaacatcgataccggcgccggtctggaacgtctggcctacctgatgcagggcaaacagaacatctatgagaccgacgaggtcttcccggtcatcgaggccgccgagcgcctgtccggccgcaagtacggcgaggatgaggccgcggatgtcaagttccgtgtcgtggccgaccacgtgcgttccgcgctgatgattatgtccgatggcgtgcgcccgtccaacgtcggccgcggctacgtgctgcgtcgtctgctgcgtcgtactgtgcaggccatgcgcgtgcttggcgtgaccgatccggtgattcccgagctactgcccgtctccaaggaggccatggtcgccagctacccggagcttaacgacaccttccacgatgtctccgaagcggcctacggcgaggaagatgcgttccgtcgtacgctggagaacggcatcgagattctcgacgtggccgtcaagaaggccaagaagaccgccgacccggtggtctctggctctgatgcgttcactctgcacgacacctacggcttcccgatcgagttgactctcgaaatggccgccgaccaaggcgtgaaagtcgacgaggccaagttccgcgagcttatggccgagcagaagtcccgtgcccgcgccgacgccctcaagaagcgtcacaacgtggacctgtcggtctatgacgacttcaagaaaacgctcgccaagccgatcgacttcctcggctacacggacatgtccgcccgtgccaaggtgatcggcatcatgcaggaaggcaagggctccgtgcccgccgtgaccggcccggccaatgtcgaggtcatcctcgaccgtaccccgttctatgcggaggccggcggtcagcttgccgatcagggtgagattctctccgatgacggcgccgtgctcgaagtcgacgacgtgcagaagcccatcaaggacctcatcgttcaccagtgccgcctgactgaaggcacgctggtcgtgggcgctgaagtcaatgcgaacatcgatctggcccgccgtggcgccattgcccgttcgcacaccgccacgcacatggtacacaaggcgctgcgcgaagagctcggcccgcaggccactcagcgtggttccgaagacgccccgaaccgtctgcgtttcgatttccagtggtccaaggctccggccaagtccgtgatttccgctgttgaggagcgcgtcaacgacaagctgcgcgacaacctcgccgtgaccaccaaggaaatgaagttcgacgatgccatcgccctcggtgccatgcacctgttcggcgagaaatatggagacatcgtgcgcgtggtctccatcggcgaagacggttggagccgcgagctgtgcggtggtacccacgtggaccatgtcggcaagatcggtatggtcaacatcctctccgaggcatccatcggttccggcgtacgtcgtgtcgatgccgtcgtgggccagggcgcatacgatttcaacgctcgtgagcacgcgctggtctcccagctgtccgacaagctcaacgctcgcccggacgagctcgctgagcgtgtgaacacgctgctcgccaagctcaaggaatccgaccgtcgacttgcctccatgtacgagtcccagctggccgccgctgttccggctctggtcgaagacgccaagaactccgctgctcccgtcaaggtggccatcaagaacgtgggccacttcggtgcggttgatgccctgcgcaagaccgtgctcgacgtacgcggccagctcggtgaggacgcccccgccgtggtggctctcgccggcgtgaacgaggacgacaagcccatggtcgccgtggccaccaacgaagccgcccgcaaggccggcatcaaggccggcgatctggtgcgcggcgcatccaagatcctcggcggcggtggcggcggcaagccggacttcgcccagggcggcggcgccgatgcctccaagatcaacgaggcacttgaggcgctcaagcacgaggcacagaaggcctgataacgcccgtggtgtggttaggcgttgatttgggtaacgcccgggtcggactcgcattgtccgacccggagcttacctttgcacacccagccgggaacattcatgttgccggtgactatttctttgccatcgatgaagtgctgaatgtcgttgaggacgagcacgtgacccatatcatcgtgggactgccgttgcagatggacggcactgaaggcaaaagcgccaagaaggcgcgcagatgggccgtaaaccttgagaagcgtttgcgttccgagagagaagaatcccaagaaccccagattccgcaggtagtattggtagatgagagattgacaacggtcagcgctcatcgtcagctgtttgaggctcagaaggcttcgaccaagcataggccaatggtggaccagcagtcggcagtggtgattttgcagacggcacttgaccgtgcgggggaacagtgagggaccggttttatggcagacaatttcaacgatttcttcgacgagaacacgcattgggtcgaagggaacgcgaatccgcccagcggctcgctggaacctccgcagccgccgaagtcccgcaaggagatgcgcaagcgccgcgagaagcgtaagcaacgccataccatggtcatcattgcggttatcgtggttatcgcactgattgtgtgcggcggatattttggtgtgaagaagctcaagtctattcgagacagccagagccagacgaccgctgtcatcgctgattatccaggtcctggcgatggcgacgtccaattcactgtggaagagggacaaggtgctgatgtcattgcgaagaacctcttcaagcagaagatcatcaagtctgccgccgcgttcaccagcgtggtcatggccaatgatgccaagctgtaccccggcacgttctcgctgaaaaagcacatggcagccagcgacgtgttggccattttatctgactcatccaacgcttccggattcctggatgtcaagtcgggcgaacgcgtcactgacgttcttgatgcggccgcaagcctgtccggcattgatcgcagcgagttcgataccatcgtgaacggtggtggatccggcatcctaccggccgaggccgctggcagctttgaaggatggtttgaaccaggcagctacaacgtgcaatccatgaccagcgcgtcggacatcctcaaggccatggtcgacaagcgcatcgccaaactcgatgaactgggagtccccagtggcagcgatcgtgaacgggtgatgatcattgcatccatcgctgaggccgaggtcaataaatccgactactacgccaaggtgacacgtgtcattgagaatcgtctcgatcagggcatggccttgggcatggactctacggtggcctatggcaataatgtgaagtcggcagaagtcactactgctatgacgcaggatgcctccaacccgtataacacatatcagattgccggattgcctcccactccgattagcaatcctggcgacaacgctatttcggctgcgctgaaccccgaaccgggtgactggctgtacttctgcacagtgaatctcgacaccggcgaaaccaagtttgccgccactgccgacgaacacaatcagaacgttgcagagctgcgccagtggcaggctgcaaacgggcagtagtccatccctgctagtccctctagtggagaaaacggcaggtggcccattcttgtagccccctctgatgagggggctcccgcgaagcgggtggggaagagaacttacaagacaaccccaacaacaatcgctacagcggctcccaccaatatcaccggcgcatacggcactttgcccgcatacgccggtgatttgcattgcgggtcgaacctcgtccaccacgcgatccacgcgataccgcacacacccatggccagccaccacaccaccacaggcagcagtccgaataagccgacggacaaccccataggaaccagtgcggtcacgtcaccgaatcccagtgatttgggcacaatgagcgccaatgcaaactgaaccaagcagcacaacacggtaaacagcagtgcctgtaacagcacgaacaaatcgtttgccaccacgccataggcgaaatccgcagccagctgcagcaacgcacccaccgcgacccatgcaatcggcacccgcctgcaccgcacatcttcaatggacagtgcaagcccacatagcagaccgggcaaggtgaacaggtatggcatggcttaacattaacccctagttactgaacatacgaaacgagggatgctatgttgcgctggcagacggcaggggagtcgcatggagaggccttggtggccatgatcgaggggctgccggccggcattcgcatcagtaccaacgacatcgtctccgcgctggcccgccgtaggctcggctatggtcgtggcgcccgtatgaagttcgaacaggatcaggtgcgactgctcactggcgtacgtcatgggttgacgctcggctctccggtggccatcgaaatcgccaacaccgaatggcccaagtggaccgaagtgatgagcgccgatgcccttgaccacgatttgccgcgtgaaggtcgcaatgcgccgctgagccgtccgcgtccgggccatgccgatttgaccggcatgcgcaagtatggcttcgacgatgcccgtcctgtgctcgagcgttccagcgcccgcgagaccgcctcccgcgtggctctgggtgaagtcgccaagcagttccttgagcaggcattcggcattcgtaccgtggctcatgtggtggcgctcggcggcgtgcagaccaaccccgacctgccgctgcccactccggatgacttggaagcccttgacgcttctcccgttcgtaccttggacaagggagccgagacgcgcattatggagcgtgttgatgaggccaagaaggctgccgatacgttgggcggtgtcattgaagtacttgcctatggtgtgcccgcaggcatcggcacctacgtggaatccgaccggcgtttggacgcggcgctggcctcggcgattatgggaatccaggcattcaagggcgtggaaattggcgatggcttccttgaagcggctcgccccggttctcaggctcacgatgagatcgtggtcaacgcggacggccgcatcgaccgactctccaaccgtgcaggtggcatcgagggcggcatgtccaacggccaggtgattcgcgtacgtggcgccatgaagccgattccctccattccgaaggctctgcgtaccgtcgatgtgctgaccggtgaatctgccgcggccatcaaccagcgttccgacagcactgcagtgcccgccgcctccgtggtggccgaagccatggtgcgcctgacgctcgccaagtatgcattggagaagttcggtggcgacagcgtggaggagactcaccgcaaccttgaggcgtacctcgcttcatggcccgagcacatgcgctgagtcgccggaacacgatcaagaaggttcatacgctatgacagcacgtccccacgccgtaatcatcggcatgatgggtgccggcaaaacccgcgttggcaaggaagtggcgcacatgctgcggctgccattcgccgatgccgatgtggaaatcgagcacgaggtgggtatgaaaattcccgcctatttcgataagcatggtgagcccgccttccgcgaggttgaggccgatctcatcgctgattttcttgaggattttgacggcattttctcgcttggtgggggagcgcccatgacgccttccacacaggaagcactggcggactatatcgcccagggcggttgcgtggtgtatctcgatgctgacccgaaagaggcgatggaacgcgccaatcgtggcggcggacgtcccatgctcaatggtgacgccaatgcccgctggaagaagctcttcaaggaacgcgatcccgtgttccgcaacgtggccaatgttcatgtgcatacccgcggacttaccccgcagggagcagccaagaaggtgatagatatggtttcccaacgaacggtgcatgtcgatggtgccgccattgaaccttatgacgtggtcatcggcgaaggcgcgatgaaccgtctggtcgatgtgttgggttccaagccggtccgtatcgcattgattcatactcagccggtgcagcggcactccgaccgtgctcgtgcattgctgcgtcaaggcggttatgaggtgtccgacatcgtgattccggacgccgaacccggtaagaccatcactgtggccaatcgtatttgggaacgcctcggcaacgaaggtttcacccgctccgatgccgtggtggggttgggcggcggtgccgccaccgatctggcgggctttgtggctgctacgtggatgcgtggcgtacgctatgtaaactgcccgacctccctgctggccatggtcgacgcctccaccgggggtaagactggtatcaacaccccgcaaggcaagaaccttgtcggatccttctatacgccagccggcgtgctggccgatatgaacgcgctggccaccttgcccaacgacattttcatcgaaggtctcggagaggtcgctaagtccggtttcatccgcgaccccgaaatcctgacgattcttgaacgacatgccgcgcaactgcgcgctttcgacggctccacattccttggctcgccgttggaagatgtggtcgccgaacttatcgagcgcacagtaacggtcaaggcataccatgtctcctccgatctcaaggagaaaggcctgcgtgagttcctcaactacggtcacacactggcccatgccattgaacagctggagcacttccgctggaggcacggcaatgctgtggcagtcggcatggtgtatgccgctgaactggcgcatctgaccggtcacatcgatcaggatctggttgattaccatcgttcgctgctcacttcgctgggcctgccgacttcatggaacggtggcttgttcgatgacgtgctcgctttgatgcaccgcgacaagaaggcccgcggcaacgagctgcgcttcgtggtactcgactcaatcggccacgtggttcatctcgataacccgcccgccgatgccgtggaagaagccttccgccgtatccagcaataaatctgagcaaccgtccgctcctggctcccctcagtctcgctacgcgagccagctcccctcaaggaggggagccagagaagaccttggctcccctccctgaggggagctgtcagcgaagctgactgaggggaacctgacgaaggagcaaaacatgaccaaagtaatcgtcgtcaacggcccgaacctcggtcgtttgggcgtccgtcaaccagacgtctacggccgtcaggatctcgacactttgcgtgaactctgcacccagtggggcaaggagcttggtctcgaagtcgaagtgcgtcaaactgacgacgaaaccgaaatggtgcattggatgcatcaggccgccgacgaaaagacccctgtggtcatgaaccctgcggcctttacccactacagctacgctctcgccgacgctgcccacatggtcatcgacgaaaatctgccgctgatggaggtccacatttccaacccgtccgcccgcgacgaattccgcaagcgctcggtcatcagccctgtcgccaccggcaccatcaccggcatgggcttctacggctacaagctcgccctcgacgccgtagcccatctcatcaacgactgattgcgccacatctgtttcgtcgtactgattttttcggcaatagtcatctataaccggtcccttcagcctcttcggaattattcagcgcaaagatttctcgtagagaaccgccatttcgagagatctttgcactgagttgcgcttagtgcaataaattctcgaaatcagggtttagtacgagaaatctttgcgctgacggttgcttagcgcaataaattctcgaaatggcggttttctacgaaaaatcattgcgctagcgatattggtgatgggcatcgtactgcgagaggatcaaattctacagcatcaaatgtgtccaaagacatacaattccgcattgatcttgaatcagtaggagtcgtcattgcccgattgagattgtcgctaccgcaatctcggaacacccgcctttgagagcattgccgtcattcttttcggattcatgacatcctcatagaaaagatgcacgatggtggtcactccttgtgccttcagattgtgttcccgacgacgctcgtactccatctttgcctgaagagaagctctgctttgattggtggtatcggcatatttcgccataccgtcatattcggccacgatgatgcgtccatcggcaagtttccaacagaaatcaactcgatatggagctgcgggattgtcggggttttcgaattccacctgcagcagcggcacggcaaaatcgcaaaggataatttgaccacgagtgaatgattctccaccattttcgcttgcaggattagcgtaacgcagtagtttggctaccgccgcctcatcacaattcgtttgaattgctaaggtattgatttcttcgacagtgacgtgaccagagcatagtgccgaatcatagattgctaaggcagaggagaaagagaatgtggaacagtcgacaagcgtccgtgccggagatgtgaccagaataccttgacacttccagagcggaattcgaggcatgtatatgcgattcaatttcgagtgatccctgccggtaataccactattgccagcaatatgtactgagccatcatgcaaggagtatgcatgctgatagccatatacgcatgcggcactgagacccgcaaacgtccactgtggatggagcgtcgccaaagcgcgaatcatgtgtagcgactgctcttcagcgttgagctgagtccaataatcggttcgggcgaacagagtggggtagggagatatcagctcgcatgatttcacgcgacgccgtaacgcatgatagagagcgctgctgctgctacttagcgcgcaacgctgtttggcctcggcctgtttgagtaaagagatgactcctttgtgctccttcatatttcgacgttaggggagtcaaaatccatcgcgcaagctgaacagacaatgtggatacagcttgtcgttccctgctcaatgtggataactcggctgtcttttctcggtgcgctgatatgcgcacatgaatgccatcgaagagatgtcggtaacacgccgggtcatacgcggatgatagagtgaaattccatggttagaagaacacatggtaattctcaagaacacgtcaccaagcatattttcgtcaccggcggcgttgtttcctctctcggtaagggtctgactgcctcgtctctgggtcgtttgctgcgcagccgtggtatcaaggtgctccagcagaagcttgacccgtacatcaacgtcgatccgggcaccatgaacccgttccagcacggtgaagtctacgtgaccgaagatggcgccgagaccgatctcgacatcggccactacgagcgtttccttgacgttttcctctcccagaaggccaacgtcaccactggtcagatctatcaggaggtgctgcgtaaggagcgcgccggcgaatacctcggccagtgcgtgcaggtcatcccgcacatcaccaacgagatcaagtcccgcatgcgcgcccaggcttccgatgatgtcgatgtgatcatcaccgaaatcggcggtaccgtcggcgatatcgaatcccagccgttcctcgaggccgcccgcgaggttcgccgtgatctcggtgccgagaactgcatgttcgtgcatgtctccctggtgccgtacatctccgccgcacacgagctcaagaccaagcccacccagcattccgtgatgatgcttcgtcagcttggcatctccccggatgccttggtgcttcgctccgaccgcccgctcaaccagtccatcaaggacaagatcagcctgatgtgcgatgtcgatgcggaaggcgtggtcaattgcgtggacgcgccgagcatctacgacgtgccgaagatcctgttcgaggagggcctcgacgcctatgtggtgcgtgagctgggtctgccgttccatgacgtcgattgggacgaatgggccgacctgctggagcgtgtgcaccaccccaagcatgaagtcaatattgccatcgtcggcaagtacatcgacctgccggacgcctatctgtccgtcaccgaggccatcaaggccggcggcttcgccaactgggccaaggtcaacgtcaagtgggttgcggccgaccgttgcgaaaccgaggaaggcgctgccgccgcactcgacaacatcgacggcatcgtgatccccggaggcttcggcatccgcggtatcgaaggcaagatcggtgcgctgaagttcgcccgcgagaacaagctgcccgccctcggcctgtgcttgggcctgcagtccatggtcatcgagtactcccgccatgtgctgggcatcgaggacgcgaactccaccgagttcgagcccgattgcgccaacccggtgatcgccaccatggaagagcagaaggacatcgtggccggcaagggcgacatgggccataccatgcgtctcggctcctacccagctgacctcgaagaaggctcgctggttgctgagctgtacggcaccacgcatgtcaccgagcgtcaccgccaccgttacgaagtcaacgtggcctacaagaatcgcctgcgtgagggcggactgcgcatttccggtcagagcccggacggcgaactcaccgagttcgttgagctgccgcaggatgtgcacccgttctacgtggccacccaggcccacccggagttcaagtcccgcccgaccaagccgcacccgctgttcgccggtctggtcaaggcttcgctggagcaccaggaggctcgcggctgaacccggactattgacggcaatatcaacgtgatgtaaatcgcgccagcctatgacaaaccatggccatgaatcacttggaattcatggccatggtgcataatggcctcaaatgcataatgccgcatataaccagtaaacgagagaatgtgtaacagttcatatgaccgataattatgaacagcctgtgggcggatcgcagccgaacattgcggggagcttcagcgatgccgaagcgacagcggtattcaccccgttcgatgtagctcagcctatggatcagtcgattgatgatggcgacgccgtgaaggccaagcgccgcaagcgtcacgtatggccttggattgtattgggtgttgtcgtagtgctgggtgccggcttgggcggaggcttctggttcttccagtcccacgccttgccgggaacgactctgtggggcaaccccatgatggggcgcagccagtcccaaatcgctgccaccattgatgacacggtgaacaacaccactgttccggtatcgtatgatggcaagaccgccaagatttcattcaaggatctgggtctcagcgtcgactcggatgcccttgcatccgaagtggtgaacgccaagcgcggcgacgctttctggcagcgttacgcattctgggtgaagaaggacgtgaccaccgccccggccaatgctggtgccgcagtctccgatacgctcaaccagaagctcggcgtcaacgaagtcaagccggtagatgcagctgtgcaattgaacggtgaccagaccggtttcgatgttgttgccggcgcccaaggtgagggtgcggatgtcgctcccgtggccgatgccgcggtaaagtcggtgcagtctcttggctcatatgagtctaagaccgtcaacgtcagtctgaaggccaccaacccggtggtgacggacgatatcgccaaccaggcaaagtccacactggacaccttgctgcagaaccctgtggccatcaaggttcaagatcatcagattgccgtcatcaacgcacccgcacttgccgcggctatgagcatcaacgcgaacgagaacgcgaagctgaccgatggccagacccgaaacggttatgtggtgttcgacgctggcaagctgcagcagtattacaacgacgccatcaaggccaatctgaagaccgatcatgaggaccgcgaagtcatcgtcaacaatgacggcgacgaattgcaggtcatcaaggaaggtcatgacggagtcacccttgccgatggcaccgactcgaacgttggacagcaggccgtcgaagcgctggccaagggcaacggggcagtcactcttgacggtacggttgacccgatgcagaccaaggccaccaagcggcatgtggtcgtagacctctctgatcgtctggtacacgtgtacgagaatgatcaggagatcaagactttccatgcttccgtgggccaggacaacaaccgcaccaccggtgtatgccagggtgacctgtgcacgccgaccggcgacttcaaggtctggctcaagtaccccacacaggacatgagtggcaacgtgaccctgtccgacggctcggtcagtcactggagcgtcaagggtgtgggtgacgtcaactacttctccaaggatggttgcgccattcaccgtatcgccaagtcgagcttcaccagcgacgccaccatcgccaacatgaacaacatctcccacggttgcgtgggcatcggttgggatgtgtccgactggttctatgactggtgcctgaacggcactaccgtgcacgtgcagctgtagccgtacaatcgcatatgaatcgactttggagcccgtctgcggacgggctcttgccatagctgtgcacgtgtgcgatacatcacgtatgcgcacagccaatattcagtcgggttggtagtgtttcagcctgggttctgttaggtttacgtaggaccatgtgtgaaacaaggaaggcaggatggtgaccgaaaacacagcaccaaacgccgccgctgacgtggagatgagccagtatgtggccgatcgtactcgcgtcaacgaggacaagatcaagcaggatgacgagatcatcagccagttcggcgattacagctacggctggcatgattccgacgccgccggcgaagccgcaaaacgaggcatagacgaaaacgtcgtgcgcgccatcagcgccgacaagggcgagccgcaatggatgctcgacatgcgtctgcgcggtttcaaggcgttcctcgacaagcccatgcccgattggggtgtggatttgtctggtttcaatgccgatgatttcaagtattacgtcaagccgattgagaagcaggctaaaagctgggacgacctgcccgatgacattcgttccacctacgaccgactcggcatccccgaagccgagaagaaccgtctggtctccggcgtcgctgcccagtacgaatccgaggtgatttacaactcgattcgcgaggacctgaaaaagcagggtgtaatcttcgtcgacaccgataccgcagtgcgtgaataccccgaactcgtcaagaagtatttcggcaccgtggtacctccggaagacaacaaattcggtgcgttgaacactgctgcatggtccggtggctcgttcgtgtatgtgccgaagggcgtgcatgtggacatcccgttgcaggcctacttccgcatcaacaccccggccatgggtcagttcgaacgtacgctgatcattgccgacgaaggctcctacgtgcactacgtggaaggctgcaccgctccgatttggtccgaggattcactgcacgccgccatcgtggagatcattgtcgagaagcacgctcgcgtgcgctacactaccgtgcagaactggtcgaacaacgtgtacaacctggtcacccagcgcgcctacgtgcgcgagggcggcaccatggaatgggtcgatggcaacatcggatccaaggccaccatgaagtacccggcttgcattctcgccgagccgtatgccaaggcatccactatgtcccttggcttcgccggcaagggccagtatcaggacaccggtgccaagatgattcatttggctcctcacaccagctccaccatcgtggccaagtccatctcccgtggtggcggacgttccgcctaccgcggcctcgtcaaaatcgtcaagggcgcctatggctcctccaactcgaccgtgtgcgatgctcttctggtcgatgacttctcccgctccgacacctacccgcatgtcgacgtgcgtgaagacgacgtctcgatggcccacgaagccaccgtctccaagatttccgaagaccagctcttctacctgatgagccgaggactcaccgaagaggaggcgcgaggcatgatcgtgcgcggcttcgttgagccgatcagccgtgagctgcctatggaatacgcgctcgaactcaacagacttgtggaacttcagatggaaggatcggtgggctgattccaatgaccgataacacagcacccgtcaaggaaattcagattccggtcgccgaccccaacgacccgtacgcggttccggccgccatgccgtcttccgtggatcatgccgtgcgttccttcaacgccagtgattaccccgaaccgaaccgcaagcaggacgattggcgttacacgccgattgagcgcatcaacgaattcttcaccgtgttcaaaccctccggcgaaacgcagatcgaagtctcgatgatcgacggctcaccactcgccgaaggtatcaagcttacccaggtcaagatgggcgaaggcctgtccggtactgtctccaagccgaatgaccgcgtctctgcggtcgagtgggagtccggcgccaccgccaccattcttgagctcaccggcgagattgctcagcctgtgctggtcaaggtgcacggcgcaggagccgatctcgatgccttccatttggtgatcgccgctgccgacaaagcccatgcggacgtcgtcgtggaacacgacggcgacgcacgcctggccgaaggtgtggaaatcaccaccggcaaggactcgcatgtttccaccacgttcattcaggaatgggccaaaaccgccaagcatgtgggcaaccatcgtatccacgtgggcaaaggcgcatccctgcgtcactcggtcgtgaccttgggcggcgatatcgtgcgcatccgtatggatcaggacttcggcggcgaacagggcgacctcaacatgctcggcatctacttcgtcgatcccggcgagcacatcgagcaccgcacgatggtggtgcacaatcaccccgactgcaagtcccgcgtggtctacaagggcgcgcttgacggcaagggcgcacactccacctgggtgggcaatgcactcatccagccgaccgcacccggcaccgactcgtacgagctcaaccgtaacctggtgctgactccgggtgccatcgccgattccgagccgaacctcgaaatcgagaacggcaacatcatcggtgccggccatgcctcttcggtgggacgcttcgatgacgaggagctgttctacctcgaatcccgcggcattcccgaaaccgatgcccgcaagcttgtggtgcgcggcttctttggtgaacttgttgaggagatcggcatcccggccatctccgaacatctgatgaccgtaatcgaccgacgactggcacgtggcgagaacgatgccatggctcaggtcctcgaagacaagtaagaacagcattttttaggagcacaacaatgtcaacactcgaaatcaaggacctgcacgtccacgtcgaaaccaaggaaggcatcaagccgatcctcaagggcgccaacctgaccgttcactctggcgaaactcacgccatcatgggtcccaacggctccggcaagtccaccctcgcttacacgctggccggtcaccccaagtatgtggtcgactccggcgaggccctccttgatggccaggacatcctcaagatgacccccgatgagcgcgccaaggccggtttgttccttgccatgcagtacccggtcgaagtgccgggtgtctccatgaccaacttcctgcgcaccgccaagaccgaaatcgacggcgaagcccccggtatccgccagtgggccaaggatttgtctgcggccatgaagcgactcaagatggacccgaagttcgcctcccgttccgtgaacgaaggcttctccggcggtgagaagaaacgcgccgaggtcctccagcttgaactcctgaagccgaagttcgccatcctcgacgaaaccgactccggtctggacgtggatgccctgcgtatcgtctccgaaggtgtgaatcgcgccaaggaagccaaccagttcggtatcctcatggtcacgcactacacccgtatcctgaagtacatcaagccggacatcgtgcatgtgttcgccgacggccacttcgtcaagaccggcggtcctgagctggccgacgaactcgaagagaacggctacgaccagtacctgcccgaaggcgccgactccgagtccgcactggcctgattttgaccgattaatgtagctgacgcgtttgggccgtgatgttctgttcccgggactgctccaggccgctcgggccatgctttacgcccgggaacagaacatcccggcccaacgttacctgtaggaaaagctatatctcgtaggaattggaaacatcggaggggaaaatagtggttgattttaaggagattcgggcacagttcccgattctggatcaggagattcatgggcatccgttggtgtatttggattctgcggccacctcgcagaagccgaatgcggtgattgatgccgaagcgaatttttatcgtacgattaacgccggcgtgcaccgcggcgctcatgagcttgccgcacgcagcactgtggcctttgaggaggcccgcgccaaggtagccaaactcgttggcgcgaatgcggccgaaggtgaggaagaggtcgtcgtcaccggaggtgccacggccggcctgaacctgctggccactgccttcggcaacgcttcgctgggccgtgggggagcagccgccaagcgttttgccttgcagccaggcgacgagatcgtcgtatccaaggcggaacatcattcggtgctgctgccattccaggagctggcctaccgcaccggtgccaccttcaagtggattgacctgactgagaatggccgtgtgcgcacggacaatctcgatgaggtcattaccgaacggaccaaggtcgtggccgtcacccatgtgggcaacaccacgggtgccatcaccaatatcgctccgattatcaagcgtgcgcacgaggtcggctcgatcttcattctggatgcctgccagtcagtgccgcatctcaaggtcgatttccatgctcttgatgtggacttcgccgcttggagcgcacacaagatgtatggcccgaccggcgtgggcttcctgtacggcaagcgtgagctgcttgaagcgctgcctccggccaacttcggtggctccatggtcgagctcgcctacatggaccatgaggctcagtacatggctcctcccgcccgtttcgaggccggcacccagccggtcgcccaggtggtggccgcaggcgtcgccgctgaatggatgatgaacatcgggctggagaacatcgaagcccatgaaaagaccatcgcggccgagctgctgaagcttggcgacatcgagggcatccgtattcttggtccgcgcgagaacgtggaccgcatcggtaccgtggcctttgacgtggcaggcgtgcatccgcatgacgtgggacagttcattgacgcccagggtattgcgattcgtgttggccaccattgcgcgcagccggtgcatcgtcactttggactgtatgcttctaatcgtgcctcgtccggtgtttacaattcggttgaggacgcgcaagcgttggtcgaaacggccaagggcatccgcaagttcttcggagtggagtaaaacgagagaacatgaatgattttggcatgagtggcgacgacctcgagcagatgtaccaggaggtcatcctcgaggcatctaagcatccgcacggcagagagtcctttgcgcctgacgccgcatccgagaagtccggtgaggcagcggcgaatattacggttcgcgccagccacgagtactgcacgcccggcgaatcgcaccagttcaaccccacctgcggcgatgaggcaaccatccatgttgaggtttccgacgacgagccgtacaccatcaagcgattggtctgggacggccatggctgctccatctcacaggccagtctgtccgtgatggtcgatttggtcgacggtaaaaccgtggacgaggccatggatttggaacagaccttccataagctgatggaatcacgtggtgccggtctggacgatgatgcattggacgacaagctcggcgatgccgtggtgttccaaggtgtatcaaaataccctatgcgtatcaaatgtgccctgctaggctgggaagggctcaaggattccattgccaaggccctagccgccaagaactgaggaaacaatgaccaacgataatctggttcccgaaccgcagccttccgtcttcgatgctgtcaatggcgtactgcaagacgaagaggcggcgcgccgcgtaatggctaatccggctttggctaaaggattccccaatggtcgcccggttgagcgcatatcagatgacgatacctgtgcctgcggcaatcatcacggcaagtgcggctgccaggatgacgagtccgatggcagcgacattccgattaaagcgattgatgacatcggccgcgccactgccgaggatgtgcgcgaggcgctgcatcaggtcatcgacccggaactgggcattgatgtaatcgatctgggcttggtctacggcattgaaatcgacgagcttggccgtgccatcatcacgatgacgctgaccacaccggcttgcccgctgaccgatctcatcgaggacgaatgcgcttccacgctggctggtctggttgaggagttccgtatcgactggacgtgggatccgcgttggaccatggagcgtattactcccgaaggccgcgatcagcttgccgcgctcggcttcaacttcgaaaacatgccgaagtactgagtttgatagttctggctctccctctttgaggagagctatcagcgaagctgactgaggggagtcgactaccaatacgagaaaagccccgcattatgcggggcttttccatacctagaccgtcaatcagtcatcgacaatggtgttcttcggcacgaccgtgatgccgtccggcgtgaccgtgaaaccacgggccagatcgtgctcggtatcgatgccgacggtggagttctcggtgagcaccacgttcttgtcaagaatcgccttgtatacgcgggcacgacggttgatgaccacgccgtcgaacagcacggagtcaacaatctgggcccaggaatgaatgtgcacgttgggggagagcacggagtggtgcacttcaccgccggagacgatcacaccgggggagacgatcgagtcggtggcgtggcccaggcggtcacgaccggcatgaacgaacttggccggcggcaggttgccggacatcgtgtaaatcggccaatcctggttgtacaggttgaactcaggcacataggcaatcaaatccatgtgcgcatcgtagaactgcttgatagtacccacatcgcgccagtaggcgtgatcggtggcggtggagcccggaatctcgttcgagttgaagtcatagacaccggcttcgttacgggaagcgaagtatggcgcaatatcgccgcccatgtcgtgcttggtatcgggagccttctcatcgagcgccaatgcctcaaacagggccttggtgttggcaacgtagttgcccatggaagccagaatctggttggggttgtccggcagtcccgtggtggtggctggcttctcctggaagttcttgatcatgctcgggtggtccgggtcgacttcgatcacgccgaactggttcgattcctcgatgggctggcggataccggccaccgtgaactcggcaccggactcgatgtgctgctgcaccatctgctcgaagtccatgcggtacacgtgatcggcgcccacgatcaccacgatgtccggctggacatcctcgatgatgttgatggtctggtagatggcatcggcggagccgagataccaatgcttaccgagacgctgctgagcgggcacaggagagacgtaggagccaagcagcggcgagaaacgccagacctgggagatatggcggtcaagcgaatgagacttgtactgggtgagcaccacgacctgacggtatccggaattaaccagattgctcaacgggaagtcgatcaaacgatatacgccgccgaaaggaacggcgggcttcgcgcgatcgcgggttaacggcatcagacgggtcccctcgccgcctgcaagcactatcgacagaatcttaggattcttggccatcgtaactgtcctctctgttaccgagcgtcttttgacaccgcactgcttgccggatgcttcattgcattcggtctacatagttaataattgcagaaaaaatcgaacacgcaaggctttcgctcccgcgtgccgtgaacttgcgatgaacagttatgggatttgctggtggtttggcgaatcgagccgataaaaaaagaagaaagctacctcgtggcatagaatgccactgcgctggatgcggctacgttgagactgtcgactccatggctcatgggaatcttaacggtcaggtcggcgcgagcgatggtgtggtgggacagcccatcgccttcggtgccgaaaatcaatgccagtttttcgatatgcgtcggatcttcggccggggcgtgcaggcgtctggtcagttcatccagcgagatcgagcgatcctcaagtgccatcgccacagtggtgaagcccagcgacttcaattcgtcgatgccttggaatggccagtaatgtttgttctcggtgccgtcttcattgcgtccggtgatacgggtccaaggaatctgaaataccgtgcccatcgatacgcgggcggcgcggcggtagagcggatcaccgcaagagggcgtgaccagcacggcatccacatcgagcgcggccgcggaacgcatcagcgcacccacattggtgtgatccacaatattctccatcacagctacgcgacgagcatccttacagacctcggccacggagggcagcggccagcggcgcatggcgcacagagctccacgatgcaaacggtagccggtcagtcgtttgagctgttcgggagaggccacatagacggggatatcggcaccccagcggtcatcgatgaagtcgaaagtctccgtcatgccttccaaccaaggttcttcgaccaacaaagagagcggctcacggccggctgccagagcacggtcgatgaccttgggggattcggcgatgaacacgcctttggcgggctcgagccgattacgcagctgcatttcggtgaggctcacatatgcctcaacgcgcggatcgtcaacggtatccaacgtgatgaactgcatggtggcctttcgtgtgagcagataacgaaaaaccccttgcattgcaaggggtctatctgtgcccgagacgggacttgaacccgtacgcccgttaaaaataggcactagcacctcaagctagcgcgtctaccattccgccacccgggcaggtgtcgttgagacaacgagagataagcttagcatcaaatcacaagtatgcaattcgggtgtgtgccgcgcgtgtcgcgtgtagcctagaaaccatgaccgatgccctttttctcttcaacccgcaggtcgatgacgtaccggtgaacagtgacgagctgcataccgggtggaaactgaccctccccgcccatatcaaacgccatgccgtgcaggccatgaggcttaaggcgggagacagcctccagctctccgatggtaggggactgcgtatccacgccgtgatggcggatcctgaagcgggtcttgccgaagtggtcaccgttggccgtgagcctgaaccgttgacgcgtcttgcattgattcaggcgttggcaaagaccgggcatgatgaacaggccgttgatatggccacgcaaatcggcgtcgaccaagtggtgccatggcaggcggatcgatccatcgccaaatggaaggccgggcgcacggataagaagtggaacgcggtgctggacgccgctaccgagcaggcgaggcgcgcgtacaagccgcagctggaagcatgtgcaaacagcaaagaggtcgtagcgatatgccgcagggcatgcgtgcacggtgacttggtcatcgtgctgcatcaggatgccaccgatacctggactggtgtggaggccaaagttgcacagctggtggaacgtacgttgtcggacggcaagccgcgcacggtaagcgtggtggtcggtccggaaggtggcatcagcgaacaggaagtggctgacttcaccaaggccggggcggtgagctgcgtgttgggcagcaatattctcagggcagccactgcagggcccgtggccctttcgctgctgtcacgcgcgcttggccggtatgagtagcggcgaatacctctgcggacgctgtattggctgaaagccgattcatgcaatgcagagtaacgtccccgcgctaagctggtgcatagcaacacagtaaaccaaggagcatgatgagcgaatccgacgattgcctgttctgcaagatcatcgcagggcagattcccagcagcaaggtgtacgaggacgagacgacctacgcattcaacgacatcgaccccaaagccaaagtgcatgtgctggtagtgccgaagaagcattatgccaacgttgctgaacttgctgccgcagatccggccgagctggctcatatcgtttcggtcgcccaaggcattgccgatcatgaattccatggcgcgtaccgtttggtattcaacacaggtcttgatgcgggtcagactgtgttccacgtgcatgcgcacgtgatgactggcgaaaagctcgacgagtagtaggagaatttccgcttcgtggcaacgactacacgcaccatcaccattccacctcagctcgatcccgtggccgtgcttggcccggttgacgaggttcttcgtgaggttgagcgcgctttccctgagctgacgattatcgtgcgaggcaaccgcgtggcaattgtctcgcggtctaagcagaccgaggctcaggcggcacaagccgaggatctggttaacaccattatccaagccgcttacaccgctcccatggacgccgataccgtgaggcgtatgctcgatcagaatgtgctgaaaaatcgcgttcgacttgagcaccccggtcatggaccggcacatgacaaattcgtgcaatcggccactgcggccgatcgtggccattcgcgtggctcgggcacgcatgacccgttgtaccgcaagccttcggttcccggtgtgatcacgtttgccgcaggtgtgccggttcgtgccaaaaccgctggccaagtggcctacgtcaatgcgattgaatcgcataccatcacttttggcattggccctgcaggtaccggtaagacctatctggccgtggcgaaagcagtgcgtgcttttcaggacaagcagattcgtcgcatcattctcacccgtccggccgtggaagccggcgaaaacctcggtttcctgcccggcacgctcaacgacaaggtcgacccatacctgcgaccgctctatgatgcgctcggcgatatgcttggagccgaccagctcaagcggtatatggatgacggcaccatcgaagtggctcctctggcgtatatgcgtggtcgtaccctgaacgatgcgttcgtgattctcgatgaggcgcaaaataccaccgaacagcagatgaagatgtttctgacccgattgggcttcaacaccacgatggtcatcaccggtgatatctcccaggttgatttggcggtgcctcgttcgggtctggccactattgagcggattctggagggcatcggagacatcgcatttgttcatctgggaaccgatgatgtggtgcgtcaccagcttgttggacagatcgtggccgcttacgatcactatgatgccatcgccggcgatcatcgcgacattgagcgcaggctgcgtggacgcaaacaccgtcaggaagcggataacggcaacgataagcaatccatgaatcgaagcgagacaaccgatgagcgttgatgtcactaatgaaacccagtgggtcatcgatcccaaggtgttctccgacctgggtatttgggtgcttgatcagatgcgtgtcagcacacaatccgatctgaccatcatgttcgtggaccccgatcccatcgccgaactgcatatgcgttggatgagtcttgaagggccgaccgacgtgatgagttttcccatggatgagctgcgccccggcgacggcaaaaccgtgatggaaggcgtgctcggcgacattgtcatctgcccgtgggtggccgcccaacaggccgccgcagccggtcatagcaccatgcaggaaatgctgctgctcaccatccacggtattttgcatctgcttggctatgaccatgtgactcctgaacaggaacgacagatgttcggactgcagcggcagttgctattgaccttttttgccctgcgaggtgatgcaaacatgcaggccactcttccatctggcactcccgatgcgctggctctttacgatgccgcgcacggcaagggccgtgacctcgattccaggaaataaaacacaaggacaccagaaaccattatggagtattccagtaccaccttgatcgttattaccgtcctcctcgttgtggtggcggcactgttcgtctggttctcgttgaccatggccgctgcggaaggtgccgtggcacgcgtgacacgagccagcttgaacaacctcattcttgaggtacagactgactccgagtcgagccagttcatcaagatgaagaaaatcgacaagattcatcgcgttcagcgtctcatcgccgaccggtatgccacggccggcagttgcgcgttcttccgcatcgcctgcaatgtgctcgatggtgtactcgtctcctcgattgcggctctatggggcgccgagctgtgggctggtctgctcgccggtttcctgttcgcgattatcgtggccgtggtctccgtactggtgcgcccgcgtaccgccggcatgaccaaaccggtcgacatcatgattgtccactcgcgcattgtggaccttggctgcaagctcacgccgttcgctcgcattggcggcgacaagtcttcagtcaaaggccctggtcgtcgttccaaggattccagcttgtccgatgacgaggagctggagaagattcagcttgaacagggcaaggccgcgattgatcgcttggtggaatccaacgatttcgatccggaagtctccgagatgctccgcaatgtgctcactttgtcggataccttgacccgcgaaatcatggtgcctcgtaccgacatgatttgcatggagcgggataccacgcttgcttctgctctgaaactgttctcccgctccggattctcccgcgttccggtgatcggagaggacgtggacgatctgattggtgtggcctatttgaaggatgcggtacgcgccacggccttcaacccggccgctatggaacgtgatgtggagtccatcgttcgccagccgatgctggtacctgaatccaagccggtggacgacttgttccatgagatgcagcgttcccgtcagcatgtggcagtggtggtcgacgaatatggcggcatcgccggcatggtcaccatcgaggatgccatcgaacagattgtcggtgagcttgaggatgagcacgaccgtacgcagcacaccgaaccggagaaaatcggtgagaacaagtggaagatgcctgcgcgaacgccgattgccgatttggaagagatctttgagatcgacattgatgaggacgacgtggataccgtgtacggtttgctgaccaagattcttggtcgtgtgccgattgtgggggcttccgctgtgacccgcggcctgcgtctgactgctgtggattcggccggacgccgtaagaaggtctccaccattgtggttgagccggcccacgtcgagggcatcaaggaagatggcaagaccaatgaagaagccggcggtgagaccgctgagagcgatgaaaccgccgacaaggagtgatatggacgaccgaaacatctcaaacgatggcgatgccgccgctgccagcgagtcagtgaggcaggaagtgccgtaccgctctggctttgtggctgtggtcggccgaccgaacgttggcaagtctacgctgattaatgctctgatcggcaagcagattgccatcgcctcctcccgaccggagaccacgcgtaaagccattcgcggcattctgaccactgataatgcacagcttgtactcgtggatacgccgggcattcaccgtccgcgcacgctgctcggccagcgtctgaacgatgtggtggaggagtcgctgtctgacgtggacgtggtggcgttcttgttgccggctgatcaggaaattggccctggtgataagcgtattttgtcccgtctgcgtaccgactttgccaccaagcgagaggacggctcattcgcgtggcgcatcccgctgatcgccatcgtcaccaagattgatgaactcggccgtcagcagctcatcaacaagcttatcgagatcaacgagttcgccgactttgcggacatcgtgccggtgagcgccctgaagcatgacaatctggccgaagtgcgcaacgtgctcatcgaccacacgcccgaggggccgcagatgtatccggacgaccagatcagcgaggagcgtcccgaggacaccatcgccgaactcgtgcgaggcgcgttcctggagacgttggatgacgagttgccgcattctctggccgtggtggtcgattccatcgactatccggaagacaacgagaccggtcagggctacgatggcaaggctcaggtcaatgtgtccatttatgtggagcgcgactcccagaagccgatcatcatcggcaagggcgcctcgaacctcacctacgtcaaaaagaagctgcgcaccccggtcaaccgcatcgtcggtcaaaaagccaagctcgacctccacgtcaaggtcgccaaaggctggcagtccgaccccaagcaactagaacgcctcggcttctaggaatcggccttcggccggttataacaaagggagattccaatggaatctcccttttgctgtactcaagccctgcttacttcttcttggtgtacatctgggtgttgaggagggtggagtagcgcttgatgaccttggggcggatgaccttcatggaggcggtcatcaggccgttctcctgtgtgaactcctcaggcaggatgatgaacttacgcacggattcggcgcgggaaacgccttcgttggcctgatcgatccacttctggacctcagcgcgtacggcggcgttctgagaggcgtcctccagagacatgttctcgtccaatcccttggcggccagccaaggacgcaaagactcctcgtccagcgtaatcagcgcggagatgaacggacgcttgtcgcccagcaccagtgcctgggacacgaactcgcaacgctgaatgacctcttcaatcggacccggcgccacattcttgccacctgcggtgatgatgagatccttcttgcggccggtaatgtacaggaagccatcgttgtcgatacggcccaaatctccggtggcataccagccatcttcggtaaacgacagctcggtggcctcatcgttcttgtgataacgcgggaacacggcgcgacccttgacctggatctcgccatcctcggcaatacgcagcgagaagccggggaacgcgacgcccacggacccggcgtggaacggggttcccagcgggttgaacgcgcatggtgcggtggtttcggtcagaccatagccctcgtagacaggcacgcttgcgccgcggaagaacgcaagcagttcagggtcaagcggcgcgccgccggccacaatccacttcatgcgtccacccagcacctcacgcagtgaggagtagacaatcggatcgaaggccgcgcggcgggcacgggtcaatgcactggccttgccgttggcggagatttccttcatgtagttctgggcagccaccacggcggaggcgaacaccacgcccttggggccatggccggccttctgggaggcggcgttgtacaccttctccagcacacgcggcaccacaatcatgatggacggcttagccacctgcaaatcactaatcagcgtcttgatgccggtggcgatgtagatatgcatattcgaggccacgacgatgtaattgatggcgcgggcaaaggagtgggcctgcggcaggaacagcaggatggtgttcttcttgttgtgcagcagctcgggcatgtagtccggcaggttcagcgcggtctggcagtagtgctcgtgggtcatctccacgcccttcggcgcggcggtggaaccagaggtgtacacaatggagcacagatcggttttcttgaccgaatcaatgcgctcatccagttcctcgtccgagatgccggcaccataggccttgatctcatcaagagcgccggtctcgatgcataggatgcgctcgagtgaggggcattcctccacggcgccttccgccttctctcgcatggcggaatcctgcacgatgagcagacgcgcgtcagaattgttgacgatattgcggatctgttcggccgagtcggtgtcgtagatggtggccagcacgccgccgcaggccatgatggccgcatcggtcagatcccagtcataggaggtgcggcacatgaacgccacgccgtcgcccttcttgatgccgtagtgcagcaggcccttggccacggcacgcacttcggcgaggaactcattggcggtgacggtcacccattcgttgtcggacttgtaggtatacagcggttcgtcacccatgcgcttggcgcgatccgcatacaggtcgtagatggacgtgccgtcgtccagaggcggattaccggcagtggacgtggtgagcagtccggtttccgggtcgatgtcggtgacggtcagatggccgtcatcccaatcgtcgctgtgcggcagttcgatgttggcttcctgcggcacatcggcattggacagataatcgggctcgtccggagtgtcgtcgtgaaccgggtgaacgaagtcggatcccagcctgagtgccttgcgggtcagattgatggtgtgctgcgtaaaggaattgataaccgacaactcttgctcctgtaaaaacctttcagtgccgttcgagcataagccgaacgctctcaaaccttagattgtaatcgttcacatcgaactcgtcaccttacgcaaccgtaggaaaagcctacgcaaccgtaggttttgggaggttctatgtggtggatggacactggcgctctgattgttgggtaacagactgccgatagtggttggagatcgttcgactactgcctagatgtcatccaatcgagttgacgcagcagggatgcgaagacgaaaaatgcgggtcttttgccccgattgttccgcctaacgagtcgaatcgcccatatccttcacttttcggctacaattgcgcctcggataaccatgtccattcaaagtagaacaagaaagggctctcatggcgcaaaacccagaagccaccgtggtgttcggcgttttgaatgaaacgtctgaaaccgaatcccgcgtcgcgttgacgccggatatcgtcacccggctgaagaggagtggagtctcctcgattattgaggccggtgccggcattgtcgccgaatacaccgatgaggattacgaaaaggccggcgcaaaggtgaccagccgtgacgaagtgctcgctcaagccgacgcgctcggtttcgtggaccgtccgtccaccgatatcgtgagcaagctcaaggcaggccagtgggtgattggtatgctcggttcctttaccgacgccgattacgtggccgcactcgagcaggccggtctggttggtatcgccatcgagaagctgccccgcaagctttccagcgcccagtccatggatgagatgacctcgcagaactccgtcatgggatacaaggccgctatcaccgccgccgatgcctatggcgcattcctgccgatgatgaccactgctgccggcacgattcgcccggccaaggctctggtgctcggtgcaggtatcgccggtctgcaggccatcggtacattgaagcgccttggtgcggtcgtcactgcatacgatgtgcgtcccgcttctcaaggtgaggtcgaatccctgggcgccaagttccttgatctgggacttgacttttccaagggccaggacgagggtggttacgctcgtgcgctgacccccgaagagcaggcccagcagcaggcggctgtcgatgagaaggccgctggcttcgacatcatcatcaccaccgccaaggttccgggccgcaagcctccggtgttgctcactgcggccggtgtcaacggcctcaagcgcggtgccgtgattgtggactgcgccgcttctgatcttggtggcaacgtcgaggggtccgccgtaggcgaacaggtcaccgagggtggcgtcaagctgattggtgccccgtacctggcctccggtgtggccaccaccgcgtccaacctgcttgcacgtaacgtggctgacatactcgtgcacttcgtgcgtgacggcaagctcggccaggatcttaccgaagagctcgacgacgcactggtggtcgccggtcgcgcaggggctccggctgctgccgccgagtccgagcagtccgagaagtaaggaagaaggaatattatgcctactctcgttgtttccattaccctgttcgtcctcgcgctgcttatcggtatcgaggtcatcggcaaggtgcccgccaccctgcacacgccgttgatgtccggcgcaaactccatccacggcatcgtcattgtcggtgtggtgattgtggccgccgaggccaacaccccgctggcttacgtgttcatcttcctggccgcagtgctcggcaccatgaacgtcgtcggcggttatgtggtcactgaccgcatgctcgagatgttcaagtccagcaagaacgagaagaagggggagtcgaagtaatgacctccgcaaccgttggagccatcgacatcgtcgcatggttcgtctacctgttctccgccgtcctgttcgtggtcggtctgcatttcatgaactcgccgaagaccgcccgaaagggtaaccaaatctccgcgttcggcatggtcgtggccgtgctcatggcattcatcgtgctcttcgccaagggcttcgtgaacgttgtggccgtggtggtgctggtcgtcggcatcctgatcggtgccgtggccggtgtcgtctctgccaagaaggtgaagatgaccgacatgccgcagctggtctccgtgttcaacaccgtgggtggtggcgccgccgcgctcgtggccctgaacgacatcctgaccaaggaaggcactccggacatcgtggtgctcatcaccgctggcctaggcattctcatcggctccgtgaccttcaccggctcgctgatcgcagccggcaagctgcagggcatcaagtgggtcaagaagctcaccatgccgggcaagggcgtgtggaacatcctgttcatcgtgctgaccatcgccagctttgtcatgctgtgcgtccagcccgagcagcgactgctctggtcgatcctgaccaccgtgttcgccctgtgctacggcctggtcttcgtgatcccgatcggcggcgccgacatgcccgtcgtcatctccgtgctcaacgcctgcaccggtacggccgtggccatgtccggtctggcgattgacaatgtcgccctgatcgtggccggcgcgctcgtcggttccgccggtgtgaccctatccattctcatggctcaggccatgaaccgtccgctgctgtccgtgctggccggtggctttggtggcggctccgatgccgccgctgctggcgacggtccggaaggcaccatgaaggaaaccactgccgacgatctggctgttcagcttgtttacgcgcagaaggtcatcttcgtacccggcttcggcttggctcaggcccaggcccagcgcgagctcgccgacctcggcgaactgctcaagggccacggtgtggaagtctcctacgccattcacccggtcgcaggccgtatgcccggccacatgaacgtgctgctggctgaagccaacgtgccttacgaagagctcgtggatctcgatgagattaacccgcagttcccgcaggccaacgtggccttggttgtgggtgccaacgatgtgaccaacccggctgcccgtcgccctggcaccccggtttccggtatgccgattctcgacgttgacaagtcccagaacgtcgtggtcatgaagcgtggccgtggtatgggctatgccggcatccagaacgagctgtacttcgaaggcaacacgcagatgttgttcggcgacgccaaggccagtctgcaggccgtgatcgctgcggtcaaggagcttatcagctgatggtgccgcgacgttcgcgcattgccgcatgagaatatgagtgggggtgtgccttcttgtgaaggcacacccccactcatttcaatgggcggtcacataaagccggtcagttcgattgagcggcggcgcgcttgcccttcgtgccgagcaccacggcgatgatggacgcgagagcgatggcgtacagcacggtgatgatcgggatcagcgcgctgtagcggtgggccgcgtccgccgtatgggagacgacgaaggacgccagctggttgccggacaatccggcgaacgcccacgcactcagagccagcccgtgcacggtcgacaccgacttcatgccgaagtgctgctcaagcagcaccggcagcgtggagaatccgccgccgtatccggcgttgacgaggaacagcatcgtcacgatcagccacagggtgccgttgtcgatcgaatgcgtgaagatctgcagcgcgcacaccgcgatggacatgatgaagatcaccagatatgcggtctcacggcgcttgcagtggtcggacagcgtggagaacccgacacgtccggccgcgttgaacacggcgtcgacggccaggacgacgctgatgcttcccgcgatggccgtggccagctgggccgcgttcagcgatgcgtacttcggaagaatggacagcgcatcatgcaggatgtccttctcctgggagatcaatgccagaccgcaggtgatgttgaggtagaaggccagccagatcgcccagaacaccggcttcttcatgatgtcgcgacgacggatgcgggtctcagcggagtacacgtatccggcggggcgcttgatcagcgtgaatcccagcagcatcatcaccgcatagacggctgcgaggatgtagaacatgggcgccagtccgacggtggagatcagccactgcatgaccgggcttgcgatggccttggccagaccgaatcccgcgacggcgatgccggtggcgagacccttattgtcggcgaaccacagcatcaggttcttcaccggcgtcagataaccgacgccgagtccgatgcccatgatcacgccatagaagatgaacacgccggggagccatcccgccgcgatgctgactccggtgccggcgaatccgcagacgaagcagaccgtcgagatcagggccgatttcttgatgtccttttcgacgaagggtccaaggaaggcggccgacatgccaaggaagaagatggcaagcgagaagccccattcgacgatgcctggcgccacgtgcatctgatcggcgatcagttgtttgaacacgctccagcagtatacggtgccgattgagatgtgaatgagcaacgccggaataacggcgcgcacccagcggttttccccatgctgttgattgaccatgtactattcgttcctctcttgttgtgttcgccctgcggcgaacaagcaacaacgtagttggaagagtggcccgcctcgatatgcgtggacggtggcggaggggacttgtggaacgttggtatcactgggttttttggaaaatgaacatcgttgatgttcgctccgggagtaatcatgaggaaaatctcatgtgagtatcgtcacggttctcacggggcgcgtcgagccgtcgccgccattgtccggcgcgtgcgtataattcatcaatgttgtcttggcgagggaggcgcatgcttccgtaatcgactcggcgtgtggttcgcaaacccccttggggttttcttcacggctcgttgatgcgccgaaacaccatgaacgaaacactcaaggagatatatatggctaccaccattaagcttgaaggcgaagtccgcaacgagttcggcaaaggcgttgcccgccgtctgcgcgttgccaacaagatcccggccaccatttacgccggtggcgccgacccggccttcgtgaccctgccgatgcgtgagaccaccctggctctgcgccacaccaacgccctgttcaccatcgagttcggcggcgagtccaagatggccgttgtcaaggacgtgcagaagaacccggtcaagcgcatcatcgagcacatcgacttcttcgaggtcaaggccggcgagaagatcgacgttgaggtgccggtgttcgttgagggtaccccgaagggtgctgcagtggcattcgtcgacattcaggagctcaaggttcgcgccgacgtctccaacctgcccgagaagatcgtggtcaacgtcgagggcctgaccgacggcaccaaggtcttcgccaaggacatcgagctgccggaaggcgccgagctggacgtcgagcacgctgaggaatccgtcgtcaccatcgaggttccggaggacgccaccgagttcacctctgctccggaagctgctgctccggctgacgccgatgccgctgctcctgccgccgacgctgacgccaagtgatgaaaccggtcgtcttcatggcggccgatctgaatcataattgcaacagaggaacccgtaaccgtggaaacggtacgggttcctctgttttcaccatgtgaactctgccacacgagcaacacatgggtgtgtaaaagtatgcaacagagctcgcgccacaagcgcacagcacataccccatctggtggccttcgggccgccaaagtcaagaagaagtagccaaatgactgaaaacacgcaccacgatccggcagcgctcgataagctcaccgaaccgttcaccgtactgccgaacgacaaccccgcatccgatgagaagcgtcagtccctcatcgacaagccggctttcggccaggtgttctccgacaacatgacccacatgacctggaccaagggcgaaggttggtccgaccgccgcgtcgaaccgtacgcaccgctcaagatggatccgggggcttccgtgctgcactacgcacaggagtgcttcgagggcctcaaggcttaccgtcatgccgacggctccacctggctgttccgcccggatgcgaacgccgagcgtttccagaactccgccaagcgtctgtacctgcctgagctgccgattgacgacttcctcggttccgtggccgcgctggtcaagcgcgacgccaactgggtgccgtcccgccgcgagtacacgctgtacatgcgtccattcatgttcgcttccgagcctttcctcggcgtgcgcgctccgcaggaagtcgactactgcgtgatcgcttctccgtccggcccgtacttcccgggcggcgtcaagcccgtgagcatctgggtcgaagacaagtggttccgtaccggccctggcggcactggtttcgccaagtgcggtggcaactacgccgcctccctgctcggtgagtataagggtatcgagaacggctgcgagcaggtctgcttcgtggacgccgccaccaagacctacctcgaagagctcggcggcatgaacatgatggccgtgcacaaggatggccacgtggagaccccgtccctgaccggtaacattctgccgggtgtgacccgtcgctccctgattcagctgctgcaggacaagggccacgacgtagtcgagaccatgatcgtcctcgaccagctgctcgaggacatcaagtccggcgaagtcaccgaggtgttcgcttgtggtaccgctgccatcatcaccccgattggtcgcttcaagtccgagaagttcgatgtcaccgtcgccgacggcggctccggcgagctgaccgttgccctgcgtgacgaactgctcggcatccagctcggcgaggtcgaagacccgcataactggatgtggaaggtgtgctgaaacagcgcattttatttctgactaagaccccttggaacagcaacaattccaaggggtcttggcgtatttagaatattctgtatctggagagattcagatgagggaagcaatatttcgcaacaaataatatgatttaggtttctgtgcgttgcggaggcttgttctggtgcgtccagatgagaaaaggagcaaaaagctatgagtaagatcagtggcgagactggataccataactcagactatcgtctaccgggaggcttcgaacactgctcgaagttgaagccggtggttgaggcagcgacggcgttggaccgggtcaaggctgtggtggatgtgctgtattcgccgggcggttgcccgtgggatggcaagcagacgaatgagtcgctgctcaagaatctgctcgaagaaacttacgaatacattgacgcggtggaaactcacgaccgcgacaatatgcgcgaggaactgggtgatgtgttgttgcaatccgtgtttcaggcacgtgtctgtgaatcggatgctgaggatccgttcgatattgatgaggtcgccgaccgtctggtgaacaagctcattacccgtcatccgcacgtgtttgctgctgatgatgttgctgattcctctgatgctgatggcaatggtggggaagcagcctcccaatccgaatccccggaagccgtgctggcactgtgggaaaagatgaagcagcaggagaagcatcgtaaatctgtattagaaggtatttctcgggctcaaggtgcattgccgcgtgccgccaaggtagtctcgcgcatctccaaatcaccgaatgctgatgaattgttcgctgcatttgttgattcgtcttcggctagcacgcagcaagatgtcgagcagacccaagcggcaaatcaatccgaatcgaacggaggcaattccgttgaacggggaaaggccgatgcctacgcggatgaaatttttgctatcgtgcgcgaggcccgtaccgacggtatcgatatcgaggcagcgctgcgcaaccgcttgcgtgatatcgaagaaaaagttgccttgatcgaatcagaaatcaacaacggttaagtcgtgattggcttttgattttgattaattcacctagcggtgcctttctgccaaagactggcatgttagcaccgctatacatgcctcaatggtgctaacttgtcagtgcttggcagtttggcattattgcgaacctctcagtggcgccatgttgccagtgcttggcaggttggcttcattcctaggctcgttcatgattcattctcgggctttttcttccttatcctgtctcgggcaaggcttggggtaggctcgggcacggcggacggcagcgccgaatgaggataaaagagaacagaacgaagacggactgagacgaaccgaagtggtacaagaggggagcggctcatgcaggtggcgttggagaacaacatcgtttttgtggtcatcgactacctcgctattttgtgttggggactgtccggcggacttgccgccattcgcaagggctatgacatcttcaccattatgctgtgcggctggctgactgcactcggcggaggtctcgtgcgcgatgtgatgctcggtgctctgcctccggtcggcatcaccgataaagggtatgtactcaccacgctgttctctggcgtcatcgcggtggtggctcatccggaaatcaccaaactcaaatggacgatgactgtcatcgatgccttgggcctcggtctgttcgcggtcaacggcactgccaaggcactggcctacggatcttcaggcatgaccgccgtattcctcggcatgttcaccgctctcgccggtggccttattcgagatctcttcatcggtgacgtaccgatgattattcgtgataagcatctctatgccgtaccttcgttcatcggctgcattctgactgtactggtatggcgtggcgtgagatacggctggtttgatatgcgctcggaaatgctgcttgatgtgctgattgtcatcattgtggtggcattgcgactgctttcggtcggtttcaatgtcaccttgcccggtgccatcgaacggcgacatgtgtatttgcctagcgaaaatcggcatattcagcaatcagatggccgaggtaacgctaataccgtggatgatgaggatacgcctcaggatggttcaaggctatctcagggctaactgccttcaaagaggtatatttggccctctgcagaatgctaactgctttcaaagaggtgtctaaagcacgaaacgttgagtataagtgttgcaatgacggtgtttatacttgggttttccgtattcggtacctctttgaacggagatacaaaaagtcccgcaaatcacatgacttgcgggaccttctaaaacctcaagaggtttatgctcacagagcgttgatcgcaacagcgaggccggacttgcggttggcggcctggttcttgtggatcacgccagcgccagcagccttgtcgagcttctgggcggcaaccttgtaggcggcctcggcggcagccttgtcaccggcggcgatggcttcgcgggtggcgcggatggcggtcttcaggctggtcttcacagccacgttgcgaaggtgcgccttctcattggtgagcacgcgcttcttctgcgacttaatgtttgccacgtttactccaaacgatgtgtgttataaggacatacaaataaaagaggatagcatgtgccccggaaaaacccgtgcaatgccacgccgaatacagtccctcggctacactaggtgaagtttgagtatatgccaagaggaggaatgcgttggtcgtccaacacaatcagccgggttccaccgatcagtcggtgattcgcaacttctgtattattgcgcacatcgatcacggcaagtccaccgtggccgaccgcatcctgcagctgagcggcatcgtgcctgagcgtgagatgcgcgaccgcttccttgaccgtatggatatcgagcaggagcgcggcatcaccatcaaatcccaggccgtacgcgtgccgtggaccttcgatggcaccgaatacacgctcggcatgattgacacccccggtcacgtggacttcacctacgaggtgtcccgtgcgttggccgcgtgcgagggtgcggtgctgctcgtcgatgcgacccagggcatcgaggcgcagaccctgtccaacctgtacatggccatcgaccatgatttggccatcatccccgtgctcaacaaaatcgatttgccgtccgccgaaccggacaagcacgccgaggaaatcgccggcctgatcggttgcgagccaagcgacgtgctgcgcgtctccggcaagaccggcgaaggcgtggccgatttacttgaccagatcgtcatggatgtgcctgctccgcacggcgatcccgaagcgcccgcccgcgcgcttatctttgattccgtctacgactcctaccgtggcatcgtcacctatattcgtatggaagacggcgaactgcgcgaccgtgaaaaagtgcacatgatgggcatcggcatgacccacgatccgatcgaaatcggcgtgatcagccccgacatgacccgtaccaaggcacttggcgccggtgaagtcggctacatcatcaccggtgcgaaagatgtgagccagtccaaggtgggcgacaccctgacctcggccgtccgaccggctactgagccgctgcccggctaccgcgaccccaagccgatggtctatgccggcttgttcccgatcgacaacgcccagttccccgaactgcgcgacgcgctcgacaagctcaagctcaacgatgccgccctgatctacacgccggaaacctccgtggctctgggtttcggcttccgctgcggcttcctgggtctgttgcacatggaaatcgtcaacgaacgactgtcacgcgaattcggcctcgaccttatccagaccgctccgaacgtcacctacgacgtgaccgccgaggatggtagcgaacaccacgtgactaacccgagcgagttcccggacggcaagatcaagaagatcgtcgagccgatggttgccgccgacatcatcacgccgaaggaattcattggcgcggtgatggatctgtgccaggaccatcgcggcattatgggcacgatggagtacatttccaccgagcgcgtggaaatgcattaccgcattccgctggctgaaatcgtgttcgatttcttcgatcagctgaagtcccgtaccaaaggctacgcctcccttgattatcatgaggatggcgagcagtccgccgacctggtcaaggtggacattctcatccagggtgagaaggtggatgcattcagcgccatcgtgcaccgcgacaaggcctacagctacggcgtgatgatgaccaagaagctgcgtggcctgattccgcgtcagcagttcgagattccaattcaggccgcaatcggttcgcgcatcatcgcccgcgagaacattcgcgccctgcgcaaggacgtgctcgccaagtgctacggcggcgatatcacccgtaagcgcaagctgctcgaaaagcagaaggccggtaagaagcgcatgaagatgctcggccatgtggaggtgccgcaggaggcgttcatcgcagccctgtccaccggcgaggactccaacgaccgcgacaccaaagacaagatccgcgccgctcagaagaccgagggctagtgttcgaggtctacatccacgtcccgttctgcttgcggcgctgcggttactgcgacttcaacacctacacggctacggatcttggtgcgggggcctcgcgcggcaactatgccaatatggtcattcgggaaatgaaattgaccaagcagtggcagctcgatcacggcatcgcggagccgccggtttctaccgtattcttcgggggtggtacacccacgattcttgccgctcgtgacttggtagccatgctggatgctatccgcaagacttggggtatcgcgtccaacgcggaaatcactaccgaagccaatccggacaccgtcaacgagtattacatcaatgagctcgcagccggcggcttcacccgtgtttccttcggtatgcagtccgccgtaccacatgtgctcaagactctcgaccgcacacatacgccggccaatgtggccgcaggcattaatgcggcgaacaaggctgggctgcgctcaagcgtggatttgatttacggcgctccgggggagagccttgacgattggcgtacctcggttacgaccgccatcgatcttggcgtgaaccacatctccgcctacgcactgaccgtggagccgaccacgaaaatgggccgtcagattgccgccggcacgttgcccaaacccaatgacgatgacgaggccgctaaatatgagatcgctgacgacctgttcgccgccgccggcctcgaatggtatgaggtctccaactgggcccgccccggatacgaaagccagcacaacctaggctactggcgcaatgtcgactgggctggcgtagggccgggtgctcattctcattacaacaatgtgactgagattgaccgcccccagtcagctttgctgacagcccccgccagcgggggcacaaccgaggccatcgcccccgctggcgggggctgtccggcggaagccggactgggggtggttcccgtctcccacggcctgcgcagctgggatattgcgcacccgcgactgtggggaactgccatcaacgagcatcgcataccgtgggccgatagcgaggcaatcactgcggaggagaacctcgaagagctcatcatgcttggcctgcgtttgcgcgaaggccttgacctcggccgcatcaatcaggccatcgcagccaacgagaacacttcatggcagaccattgccgtcgattcgcttcgaccgatggttgacgaaggtctgatcaccatatccggcaatcgtgtcatccccacccgccgagggcgcctgctcaatgattcggttatcgaacggttcttcggccttgccggcatctgaccggctcgtcctcgattgcagtggaatcaggggagaatcacggatgccactgccaacgccatggcttgcctctgattacagtggcatcaattgtcggatgtctttttcatagcaggagatttcttgcttaccgactcatagggcggagtcggcgtaacgaaatgaagatgccggttggagaaattcacaatcactaagaaatagaaaagtacatatggacaccgttgtccggttatcgttcagttattgcgatattcaattatcgaattggcgaattgacgccgggggattgacgctcattaataacgtgcaatctcatatggaacgctgtgctgaagtgattcagcgagcgtccttgtcgtcacccttcatgaggtcaacgaacaccttggagctggcgtgaccgcactggctcatggagctcagaccgtacatagcgaaaccgcgaatcatggaatccttgaaggacatggctgtttcctttcattggtcaaagccttgcagctttgatttatttctttggcttctttctgaaaccggtttcagaataacgcatatcaatgacgaatgcaagagatacggccaaccttcggtgtttctcactggttccgcgcatgctacggagtcagcacccgttgtcttgcgtgtacatttgtatgagaagcgtaacgactgagacgagtcggcgaacaatgggggctcgaaaacaatggcgagaagtacgggacgcactcgtccggtaatcaaagacgtggccaagctggctggagtttcagctcccacggtgtctcgttatctcaatggcacggtcaatgtgaccgaggacaggcgtgcgcgcatcgccaaagccatcaaggaactgggctatgaacccagcatcgtggcccgtgccttgtcgaaccgggaaatggattcggtagtggtattcgctgccaatcccgccgccttttccacctccgaaacgaatcatggcgttgaggccgccgcccgcaaacgtcgattcctgctcaacatcgtgtccctggatgaatccgacatggaatccgtcgaggcacgtgtgcgcatgggtctgtcgatcagaccggctggagtggttgtttacgaatacgatcaggccggtatcgcggcacttgactatattcccaaggatatgccgaaggtcgtggtcggcggcagtttcggcgacggcgactaccagatcatcaacgccgaacgagatggtggtcgttggatgaccatgcacctgttggatctcggccacaaaaccgtcttctacgttggacgggtgcaaggagctactgacaacacccgtgccaatgggtggaaagatgcgttggaggagcgggggattgaggctcccgaacccattgttgtatccgacggcaatctggagaaggccgtcaaggcagggcatgaactcggccgtcgtggcgaggcgaccgcgatttttgccgacagtgacgaaaccgcgatcgctgtgattcgtggtttgcgagagaccggtcgacgtgtgccggatgatgtcagcgtggtcggattcgacgatcgtaatttcggtgccctatgggaaccctctctgaccagctatacccagaatttcttggacatgggggagcggtcattccgcatgctgtttgagcagattcaggccaagcgtacgggtgccgacatgccaccttcccagattgaagtagtgcaggggcagccttgcctacgcgcttccgaacgagagatctgaagggtctggggttttccgattactacttgctctgcgctgcagaattgcggtcagtcgtcgcgggccgaagccgttgccattgccgttccgcttgatgttttgctcatcagggtgtggcgctcccagtacaaagaagcgccggcagccagcctgccatagaggctccgctgccgccgctgcgcctcgcgcgcatacagtatccatggagttgatgtcgacaaacgattcgcgatcaccgatgaccaataccggcttgcctgaaccatgatgtagcacctgttcctcatgaccggcctgcacatgatgatgcagtatgacggcgatcacctccgtcggtttgctcgacattcattgagcgaactgttgattgctgttcacaatacgaacgtttctgtgtcgaattttttgtggtctagtagacattgcgagctaaaacgcccgaaacaccccataattggctataacagattgcttgagaatcactattgacttttatggcgactcggtatatggacacgcgaaacgtaaatgacatgacgcaacggtactgtgtcaacagcaatgaacgaagaggcacgattcccttacgtgcccacaagcaattgaggtgatttcggtgacattcaaagccccgctcgatctcacggtccacgctccggacggtatgtatgacccctccaatgagcatgacgcctgtggtgtgggtatggtcaccactttgaacaagcgccccgagcgcaagatcgtcaccgacgccatcgaggtgctggtcaacctcgatcaccgtggtgccgtcggcgccgaggagaacaccggtgatggcgcaggcatcctgatgagcatgccggacgagttcatgcgtgccactgtgcccgccgaactgccggaagccggtcactatgccgcaggcatcgccttccttgaccgcgatatcgaaacctccggtcagcaggaacaggctatcgccaaaatcgtgcgcgaggaaggccttgaagttctcgcctggcgagtagtgcccaccaacccggacggccttggcctgcaggcccttgccgccatgccgggattcaagactctcgtggtcgcctctccggacggtgctctggccggcgtggacttggatcgcaagaccttccgcatccgcaagcgcgtcgagcatgaggtaggcgtctacttcgcttccctgtccgcccgtaccatcacgtacaagggcatgctcaccaccatgcagctcactcacttcttcgaggatctgaacgacgagcacatgaaggccaccatcgccatcgtccactcccgcttctccaccaatacgttcccgagctggccgctggctcagccgttccgcctgctggcccacaacggtgagatcaacactattcagggcaaccgcaactggctctccgcccgtgaaggtcgcctgagcagcgaattgctcggcgagttcgagccgctgctgcccatcaccaccccgggctactccgattccggcaccttcgacgagtgtctcgaactgctgcatctcgccggccgttccctgccgcacgccatctgcatgatgctgccgccggcgtgggagaagaaccccgacctcgacccggacgtgcgcgccttctacgagtacaacaatacgctgattgagccttgggacggcccggccgacatcgtcttcaccgacggcactcaggtgggtgcactgcttgaccgtaacggcttccgccccggccgctggcagctcaccgacgacggctacatcgtgctggcctccgaggccggcgtgattccggaaatcgagcaggaacacatcgtgtccaagggccgtcttgagcccggtaagatgttcctagtcgacaccgccgaaggccgcatcattcccgatgaggagatcaagaagaccctcgcctcccagcacccgtaccgcaagtgggtggaaggcaactcggtcgagatgagcgacctgccccgccgcgagcacgtgagccactccggacagtccgtccagcgccgtcagcgcgccttcggctacaccgaagaggatctgaagctgctgctcaccccgatggccaacaccggtaaggaaccgctcggttccatgggtaacgacaccccgatgccggccttgtccagccgcagccgcatgctgttcgactacttcacccagaagttcgcgcaggtcaccaacccgccgctggattgggagcgtgaggaaatcgtcacctcgcttgaatccgccatcggccctgaaccgaacctgctgtccgattccgaactgcacgccaagaagattctgattccgctgcccgtggtcaactctgatgagatggcccagctcaagcgacttgacaaggcccgtatcctcggcggctactaccgtccgtacgtggtcaagggcctgtaccaggtcgccggcggcggcaaggccctccaggagcgtcttgacgagatcttcgccgaaatcgacgaggccattgataacggcaagaacttcatcgtcctgtccgatcgtgaatccaaccacacttggggcccgattccgtccctgctgctgacctccgccgtgcagcaccacctgttgcgccgccacacccgtacgcagatctccatggccgtcgaggccggcgacgtgcgcgagattcaccatgtcgcgctgctcatcgcctacggtgccgcctgcgtgaacccgtacctggcattcgaatccgtggaagacctggcccgcaacggctacctcaaggtcgacgcggacaccgccgtcaagaacctcaccaaggccctgtccaccggcgtgctcaagatcatgtccaagatgggcgtctccaccatcatgagctaccgtggcgcacagctgttcgaagccgtgggcctgagcaaggaagtcatcgacgaatacttcaccggcaccacctcccgtgtgggtggcgtgggccttgacgagatcgccgaagaagtggccattcgtcaccgcgtggcctacccgaaccagtggagcgcatccccgcaccgcaacctgcgcactggcggcgactacaagtggcgtcgtaccggcgaggaccacctgaacgatcccgaggccatcttcctgctccagcagtcgacccaccgtggcgactaccagatgttcaagaagtattcgcaccacatcaacgacacgtcgaaccgactcatgaccctgcgcggcctgatgaagttcaacaacaaccgcaagcccatcgacatctccgaagtcgagccggccaccgaaatcgtcaagcgcttctccaccggtgccatgagctacggttccatctcgcaggaagcccacgagacgctcgccatcgccatgaactcgattggcgcacgctccaactccggcgagggcggcgaatccgacgaccgtatcaacgatccgcaacgttacagccgcatcaagcagatcgcatccgcacgtttcggcgtcacctctgattacctggtacacgccaccgatttgcagatcaagctcgcccagggcgccaagcctggtgagggcggccacctacctggagccaaggttccgccgtggattgccaaggttcgccacgccaccccgggcgtggaactcatctccccgccgccgcaccacgacatctactccatcgaggatctgaagcagctgatcaacgatgcgaagatggccaacccgaaggcacgtatccacgtcaagctcgtttccgagttcggcgtcggcaccatcgccgcaggtgtggccaagtgccatgctgacgtggtgcttatctccggctatgacggcggtacgggtgcagccccgctcaacgccatcaagcacgccggcaccccgtgggagatcggcctgtccgaaacccagcagacgctaatcctgaacggtctgcgctcccgcatcgtcgtccagtgcgacggcgagctcaagaccggtcgtgacgtggtcatcgccgccctgcttggtgccgaggaattcggcttcgctaccgcagccctgatcgtggaaggctgcgtcatgatgcgcgcctgccagaagaacacctgcccgcagggcattgccacccaggatcctgagctgcgcgctcgtttccgtggcaagcctgagcatgtggtcaacttcttcatgttcatcgctgaggaagtgcgcgagattctcgcccagctcggcttcaggactcttgaggaggccatcggccacgttgagtgcctggatcaggacgaggccatcaagcgctggaagtccggcggcatcgacctgaccaacgtgctcaagcaggctggtccggtacccggcacgatcctgcaccagaccatcgagcagaaccacgagctggagaaggcgctggacaacaagctcatcgaacttgcccggccggccctcgaacacaaggagcccgtgcgcatcgaaatgccgattcgcaacgtcaaccgtacggtcggcaccatggtcggctacgagatcacccgccgttacggcgaggaaggtctgccggacgacaccatcgacatgaccctgcacggttccggaggccagtccatcggtgcgttcatcccgcgcggcgagaccatgcgcatctacggcgaagttaacgactacgccggcaagggcctgtccggcggtcgcatgatcgtgcgcccggaagatagcgtcacctttgataagcatgacaacgtcattgcaggcaacgtcaccggcttcggtgccacttccggccagatgttcgtggctggtcgcgccggcgaacgtttcggcgttcgtaacggcggtgccacgtttgtggtcgaaggcgtgggcgaccacggctgcgagtacatgaccggcggcactgttgtggtgctcggccccaccggacgcaacttcggtgcaggcttctccggcggtaacacttatgtgcttgacctcgacatgaagaaggtcaacccgggtgccatcaagtccggtgcactgctcttcgagtccctgaactccgaaactgcaaaggtggtgtacgacctggtcaagcagcacgccgaggagacctgctcgcagttcgccgctgctctgcttgaggactggaacgagactgtgaagcgattcacgcacgtggtgccgaagcagttcgtggccatgaccaaggccatggaagaagccaaggccaacaatgtagatttcaatgcgcccggcgcctgggaaaaggtgtacgagcaggttatggaaggagcgcgctgacatgggcgacccgagaggatttctgaaggtccgtactcgccgggagctggccgaacgtcctgttgaggagcgtatcaaggactggtttgacgtccacgccgagtcaggcgtgcagccgtggacccaagaacaggcggcccgctgcatggactgtggcaccccgttctgcatgaccggctgcccgctgggcaacctgattcctgagtggaacgatctggtccgtcagggcaagtgggaggacgcgtacaaccgtctgtccatgaccaacaacttccctgaagtcaccggtcgtatctgcccggccctgtgcgagcagtcctgcgtgcttggcatccaccagccgccgactatgattaagctggacgagcagaccatcatcgatcaggcatgggatttggactacgtcaagccgctgccgccgcagcgtctgaccgaccagacggttgccgtcgtcggctccggccctgctggcctcgccgccgcacagcagctcacccgcgccggccacactgtcgtcgtctacgagaaggacgatgccattggtggtctgatgcgttacggcatcccgaacttcaagctcgaaaagggcctgctcgaccgccgcgtcaagcagatggaggccgagggcacccgcttccgcaccaatgtggaaatcggcaaggacatcacgtgggatgatttgcgtgaccgttacgacgccgtcgtggtggccatcggctctcgcgtgccgcgcgacatgaagattccgggccgtgaactcgacggcattcacttcgcccttgacttcctgccggacgccacccgtcgtatcttcggtgtcaagccggtgcacgacatcaccgccaaggacaagcacgtggtgatcatcggcggtggcgacaccggttccgactgcctcggtacctccatccgtcagggtgcgaaggacgttaccgtgctgcagatcatgccgaaagagccgacctctcgcccggataacagcccgtggccgaccttcgcccgcacctaccagaagacctcctccatggaagagggcggcgagtacatctactcgaccgattccgtgaatttcgagggcaccgaagaagagaaggccaaggtcaacatcgataactcgaccactgccgaaggcttcgtggccgacgagcgcggtcacgtcaccggcctgaaggtcgtctccgtggcccccggcgagaacggtccgttcacccgccagcccggcactgagcgcgtgctgccggccgatctggtcctcatctccgtgggcttcctgcacccggacaccgagaccatcctcgaccagatgcctgtcgaactcgacaagcgtggcaacatcgcccgtaacgacaggttcgccacctcccaggacggcgtgttcgtgtgcggtgatgccggccgtgggcagagcctcgtggtctgggccatcgccgaaggccgctcctgcgcctccgctgtggacgagtacctcaccaaggaaaagagcgagctgccggcccccatcaaggccagccagcgccccatgatgctgcctcgctgaatactttcctaacaaaagtatgaaaatcccctctttggaggggattttcgcgtttctgggattaaatattgccttaattcttaagtaatgtctatatttcgagaatattgcatacacggttaatatgaagctcctatggtggctttcgtcgccaagagacgacaccacaacatttgggagagattcatgaacacacgtcatgccacttcactggtcgcggccggtgcggcaattgtcatgctgctcagcggctgcggatcgactggtacctccaattccagcaatgcttcagattccaacatcatttccgtgtacggcagtgagccggcacacccactattccccggcaacaccactgaggccggtggcggcaaggttgtagaccagctgttcgcaggtctggtgacctatgatgcgcagggcggcatccacaacgaggtagcaaacagcatcacctccagcgacaacgccacgcattacgtcatcaagctcaagagcggatggaagttcaccgacggcactccggtgaccgcgcactccttcgtagacgcgtggaattacaccgccaacagtgccaacaagcaggccagcgccagcttcttcagcacaattgaaggctatgacgatttgcaaaagccggacgtggaccccaaggccacgctgagcggcctgaccgtcgttgacgacaacaccatcgatgtcaagctcagccagcccgactcggcattcccggttaaggccggcagccacgcctacatgccgttgcccgaatccgcgttcaaggacccgaagaagttcggtcagcacccagtgagcaacggcccatacaagttcgtgtcctggcagcacaaccacagcatcgaaatggtgaagaatcctgactacaagggcaatcgtgtcgccaagaacgatggcctgaacttcaggatctacacctcgcctgattcggcatacgccgacctacgcggtggcaacctggacttcacgaacacgattcctgacaccgcacttacctccttccaatccgacaagtcgctgaaggcatacaacgagcccggtggcaatacgctcaccttcaccattcctgaatggctggaacacttcggccagaacgaggaaggcaacctgcgtcgtcaggccatttccatgtccatcgaccgcaagaccatcgccgagaagatcttccacggcaccgccacgcccgccgtcgacttccttgcagccccgattagcgcctactccaaggaactcaagggcaatgaagtgctgaagtacaacccgtccaaagctaaggaactgtgggccaaggccaacgccatctccccgtggagcggtgagttcggcattgcatacaatgctgatggcactgcgaagaactgggttgaggcaatctgcaactacgtcaagaacacgctggatatcgatgccaagagcatcccgatgtccacttccgacgaattcctgtccaatgtggattcgggcaagatgacctccgcataccgcagtggttggggccctgattatccatccgcggacaactatcttgtacagctgtacgattccagttcggccgacggcaagggcggcaacagcggcaactacaagaaccccgagttcgatgccatgatggacaaggctctttccgccccgtccaccgaggaagccgacaagtattatcagcaaggtgaggagattctgctgcaagaccttccggctatcccgttgtggaaccagaatgccaccgcagccagcacctccgcagtctccggtgtcgcattcgactacggcggcggcccagtgttcaccgcactgaccaagaagcagtaagtaataaacagacagcgctagccccccgctggcgggggctgtcggcaaagccgactgggggtggtctcaaaacagcagaccacccctaatcttgttatatgggcgcgctcccgtaagcgggagcaatcgagaacatacaggagcactttaactatggaattcaccgtatctggcactaccgtgcgattcgatgaacgaacgatgcagttcgcttttacgcgcgacggtgccgaatggaatacctgcgctgatttcaagccgaccctgcaatgcacgcaagacaccttcgcgttcgccgatgccacttccatcacccacgaacaacgcgaaaccggcacgggaaccggcattcgcagcatcttcaccggctttgggcacagcgcatactcctttgaaacctatgtatgggtggagcgcgcctccggcgatgtgctcttcgaatggattccgctcaatgagcaagggctgaccgtcaccggtgtgacgtggcctgcggcaatcgccttcgaccgtgacgactcccacgacgtgacgcttattacccacgaacagggcgtgatgattcccaacacatggcctaccgccgtgagcaccaaagatatcaccttcgacggccgcttcgaaacggctggcggttacatgccgtggttcgcgcagcttcgcgcagacggacacgggtatatcgccatctgcgaaactccatggaacgccggttacggcatcgaccatcccagcaatggcccgtacacccatatcaatacttggtttgagccaagcctcggcacaatgaattatcgccgcgtggtacgctaccagttcctcgaccacgccgatcatacggcggtgtgcaaggcctatcgttcgtacgtcaacgaacgaggtcgcttgcgtacgctcgccgaaaaggcggcgcgcaatccctccgtgcgtgacctgattggtcgttcatgggtgcacgtcggcatcaaaaccaaagtgcagcccgactcgttctactatgacaaggaccaccccgaaaagaacgattcattggtcacctttgcgcagcgcgagaagcagatgcgcacactgcacggcatgggtgcaggccgactgtacatgcacttggacggttgggcacagcccggatacgacaacgcacaccccgactatttgccggcttgtcaggaggcaggcggctgggaaggcatgaagtcgctggtcgacgcctgccatgagcaaggcgatattttcggcacgcacgaccaataccgcgattactacttcaccgcgcaaacctttgatgccaacaatgcgattcggctggcagacggtacgatgcccgaacacgcacgctgggcgggcggccaccagacctacctgtgcgccgagctcgcaccggactacgtacgccgcaatttcacccagattgccgcgcatggcatcacgctcgactgtgcatacttggatgttttcacctgcaacgaaggcgacgaatgctcgaaccccgaacaccgcatgacccgccgcgaatgctttgaccgccgcaccgaatgcttcgaatatctgctctcgcacggcatcctctcctcgtccgaagaggtatcggactgggcggtgccgagcctggtattctgccattacgcgccatacgatttccagatgcgctcacccaacgagccgcgccaaggtgtgccggtgccgctgtataacctcgtctaccatgattgcgttatcgaaccgtggatgatggagcgtgtggtggacggcgacgattacatgctgtacgccttgctcaacggcggagctccatacctgattcgcgatgccgcatacatcggcgttgacggcgacatggacgacgaacagcgcgctcgcaccgaaaacgacatcgaacgctgccatacggtcgctgcattccatgagcgggtcggcatgcaggaactggttcgtcacgagttcgtggatgatgatccgctggtgcagcgttcggtattcgcggacggcactgcggtcacttgcgacttccatgcgcaaacctatcgtatcaccgactgcccgcaccactgactgaaaatacaatgacacacagtgggttccgatggactggtggcaaattgccgccgataagcgagtaatatggccaacagtgtcaccgtcgaaacaggagtagtgaaatgccgaatcgtgcagaacgccgtgcccaagccaaggcaggccgcaggggagtgccgtcgcagtatgaccagacccgtggtcgtggccgttcgggaatgattgacgaatatcagctgcagcagaagtcccagcgtctgcaggacggcaccgacggcaccgaatggaagcccagcggcggtacgattgcggacaccgaaaccctgctgaccactaacccgaactacacgaatccgaagatgttcaaggcaccgcattcgctgcgtcagtggttccgcgtgggcagctggacgctgatcgccatcgcgattatcgcgttcttcgtggttatgtggctgccaagccatccgatgtggctgatcatcaccgtttccgcggtgttcattgtgggtgtgctgagcctgttctttacggctggcgattccaagcataatccgaatttggatcagaacggcacggctgtctgatcttttgcctggtaaatccggcttgaaaagcaaaacgcacgacggaagttgtgcgttttcttgtatgcggtgccctaaagtaagaagtgcttgagtttctttctgacgcacgaaggagaggcagtccgatgaaagttgatattctaacccgcgaatacccgccgcatgtgtatggcggtgccggcgtacacgccgaggagctgtccaaggttttggccgagcgcattgacgtgaccgtgcgtgcgtttgatggcaagcgcaccgaggctgatatccccgcgattcccaatgccgctaatgccaagggcagtctgaaggttgtcggatacgatacgccgtccgagcttgccgatgccaatccggcattgaagaccttcggcgtggatctgcagatcgccaacgacgttgacgccgatatcatccacgcacacacatggtacgcctgcctggccggctacctggccaagatgctgcacggtacgccgctggtcatcaccgcccactccttggaaccgttccgcccatggaagcgcgaacagctcggcggcggctacaacctgagctcctggggcgaaaaggaagcctacgagaacgccgaccgtgtaatcgccgtgtccggcggtatgcgcaaggatattctgactgcttacccgaacctcgatccgaacaaggtggttgtggtgtacaacggcatcaccatggccgacttcgctaccccggcaccagacgatccgagttggaaggtgttcgagcgttaccacatcgaccgctcgaagcccaccctgctgttcgtaggccgcatcacccgtcagaagggtctgccatacctgctcaaggccctacatctgatttccaaggacattcaggtggtgctgtgcgcgggagcgcccgacaccccggaaatcgccgaagaggtcaagaccgcgttcgccaagctggatgaggagcgcggcaacatcgtctggattgaagaaatgctgccgaagcctgagctgaatgctttggaacacggctgtgatgctttcatctgcccgagtatttatgagccgctcggcatcgtgaaccttgaggccatggcctgcggtctgccggtcgtcgcatccgccaccggcggtattccggaggttgtggtcgacggtgaaaccggctatctggttccgattgaccagttgcacgacggcaccggcactcccaccgatccggacaagtttgtacacgatatggccgccgctatcgacaagatcatggctgaccccgaactcgccaagaagatgggccaggccggctacgaacgcgcccgcgacgtgttcagctgggagaccatcgccgacaagaccgtggaagtctaccagtccgtgctcgacgagcagaagaagtaagtagcgctgcaacgagtgctcccctcagtccggcgcaggtgactgaggggagttctcagaccgcgaatcatagctagtatttcactcatgacaaacaccgtcctccaactcgacaacgtcgaattccggcgcaaccgtcgcgtcattatcaccgacgtgaacctcaccatcaacgcgggggagcgttgggtgctgttcggtccgaacggcatcggcaaatccaccgcggtcggcatgctggctacccgcaccttcccctcagagggccgcgtattcatcctcggtcatcaactcggcaaatacgacgtattcaaactgcgcacccgcatcggtctcgcctctgccgacctgggccggcagttccccgagttcgaggacccgctggacgccgtggtcaccggcctgtccgccgtgaccgggcgctggcgcgacacctacacgcaagaggaatacgcccgcgcccgccatctgctgcgcgattttcgcgtctcctatctggaaggcaaggagatgtggcgactgtccgaaggcgaacgcacccgcgtattgatcgcccgtgcgctgatgggagatcccgagctgctcatcatggatgaaccgaccaccggccttgacctgggcggccgcgagcaggtgatgcgcacattgagccgaatcggcaaagagaactccgagcgtgccgtggtgctggtcacccatcgcttggaggagattccggccggtttcgaccacatcgctatcatgggacgcaagccgattcctgccgaggacgccaccgaagcgggcgtggattcaatgggtaatcccggtgctggcaccatcgtctacactggttcgttggagaatggcctgaccgacgaacgcttgtcggaattgttcggtatgcccatcgaagtccagcacacccacggccgctgggccgcctacgccgtgtgatacttgtaggtttttaggcgggattttcttcgccccctctggagaggggctgtcagcgtaagctgactgggggcaaccagttacgaaggcaaccatgacaaccaatagcaaactcgtattcatcgatatcgacggcaccctagccgacgaaaaccacgtcgtacccgaatctgccaaaatcgcttgcaaacaagcccaggccaacggccacaagctcttcatctgcaccgggcgttccgtgccgaaaattgagcgcagcatcctcgacctcggtttcgatggcgtggtttccgtggcgggcgctcaggcgaatatcggagacaggctgctgttccggcatctcgtccctcctgaagcggtcgatgcggcgatggcgtattttgccaagcatcatatcgagagctaccaatggcaaggtgcggatggcatgtacatctcggaaggctaccgtcaacatctggaatcgaaaggcaagacctggaatcgtggcgaattcgcgcgattctggcacctgttggatgaggtggaggtgccggctggctcgactttgggacagacgatccgtgtgagcaaggggtcatacttcacctcgccgaatcctgacgtgactttcgaggagactcaacatgatttgagcccatggtttgagctcgtgcatggttcgtatgacaagatttccccgaacaatggcgagttgctgattaatggcatcgacaaaggtaccgctgtgcgcgacgtggcttctttgctgggctatgccattgccgacaccatcaccatcggagactccgacaacgacactgccatgctcaaggccgccggcacatccgtagccatgggcaacgccattcacggcatccaagccttctgtgacttcaccaccaccgacattcaccagaacggcctggccaacgccttcaagacgttggaactggtgtgaggctatgtcgtttgctctcagacgaaggatcctttcgtgctgtagtattgcgacgcggcacaacgtatgttgtgccgagcatagagaattgtgaattcaaaatggtttgttcatcatgcgaagatagtggtcatctgtccgtcgcggttgcgcaatttacggtggcggaggagcccggaacggaatctggagatcatcgacggattcgcgcgtgatgctgcggtgggcgatagggaagccgatctcattactgctgagctgagtcgtgagtgtcttgattccgcgcgtcgaacattgccggtgttgcagaatcgccgttttgccgatccgcagttgtgtgactgacctctggataactttactagcgctgttgataaaggttctatgatgggaatcatgaccactactgttgatagctctgattcaatgccggaacgtctgcaagaggggagcgtggcgcccgatttcactctgccggcggttatacctgggtttacagagagcggatcaatcaacctgtctgacgtgctcgatgccggccgcagggttgtactgtacttctacccggccgcgatgacgcccggatgcaccactgaggcttgtgattttcgagataatcttgctcggctggaatcgcagaatgttgtggtgctaggtgtgtccaaggattcgctcgataagctgcgcaagtttgccgagcgtgatcatctcacgttcccgctgctgtctgatcccgacctgaccgtgcacaagctgtacggcgcatacggcgaaaagaagctctacggcaaggtgcacgtaggcgtgatccgttcgacgctcgtcatcaattccgatggctccgtggcgattgcgcgctacaacgtgcgtgccaaaggacatgtcgattcgctattaaaggcactggaaaaagttggagaagctggagaagtagtgcgttctcgttgttcggacacagttgttcgtgcatagcagttttgtgcggtatgtgccgtatgaaccactgccgtatgaaccaccggttgacttctcggactcaccggcaaatagtgagaccgtgggcgcgcagtacgtctatggctagcatgtaatcgagcgatgttgcggtgggattgagcatcggttcgcggatggcggcggatgctgaggactcgcttgtcttcgaggattctgcggccgggaagagagcgttggcgattagggagatgatacgggaacgtgcatcgccggcattggcattgttgctgctgttgccagcgtcggtagtggcggagttgccaatagtagcggagctgttttgtagagtcgtattcaacgctgtgacaagcggctccaggttgttctttgtcgcctcggcaatgtcatcgagctgatcgaataaggcgaacagccatacacgactttgctcctcatcgttgccggtcgcaagcctttcatcggtgaggcgcacgagttcgtcaatcggtactgctggcgtctttgccggatcgcgatgctcacggttgtctccgatatcgcccataagatgctggatttcgcactcgtcctgcaatatggtggtttcggctgccggggtaactgcagcttcgtcttgctgattgaaatggaaagggctcacacaagcaaggccacaacgatcgcagaaaacaccgccacggcaatcagtggtgcggtgccgtcgacgaaagcgggcatgggtggcagatggtagtaggcgaggtagcaggccatgttggcgataagcaaaaccagcaggatgatggccaaaacgatggcggcggttgccccgagagctccggaactgtgcaacatagtcagcgcacatagttccagcgtgatccacatgacgatgagcaacagttccgtggtaatcggccgttgcaacagtcgcgaagtaagcacggccagaatgacataggcggcaacaccgccgactgcgaacggccagatccagacgctacgggtacgtccagcggccgcggacaatgtgggcaacgcggacaatttactgatgccaaaacattccaacaccactccggcgatgcccgccaccgcggccacaagaatgcacgcaataccgaatacgcgcagcgcgccacctttgacctgcgcattcgggcggaagaaaatgcaccaccaaatcagatacagcctgcccccggcagcacatggccccacatcagctgccgcgaactgctgaatccgccgatttcgccgagttcgccggccctattaagtccctcaactccatcaatcgccgtctgacccatcacatcacgctttcatacacattgccgattgacagtcttagaacacagtctagaactgtcatggcatgttcacgcagacaggggctccaacaaaattggctaaaagagaactcggcaacctataacaaggacgcgcccgtgtgcccttacgttcagctccgctcacgaatgaaatcgaagatcacgtcgaagacctgctggctccagaaatcgtactcatgttcggcgccgtcgactagcaccagctgcgcgtccacgccgtgctcgaccagccggtcgcgcatcttgacggattgatggtaggggaccacggtgtcggcggtaccgtgcaacaggagcatcggcggatactgttggtcatcccgcacctgcaggtaggggctcatgtcagccgcgcgctgacggacctcggcattgatgccggtctcatgggtcgcgcccaccacggccgcgaacgggccgaaataatacagccggaatggattggtctcatcgtcgaatgcgtcgacagcttcaagcatgtcggtgggcgggaagcaactgaccacgtacttcaccgcatcgctctcatcggcattggtgccgtcctcataccgcggatcgtcggcggtcagccccaccaacagtgacgtgttgccgccggacgacgtgccccagatgccgaggcggtcggggttcacgtgccattgacgcgcgtttgccctgagatagcggatggctgctttgacgtcctcgagatatgcggggaacacgtcgtggggatcgctcgaggcatcgcgatgattcaccgtggccaccacaaagccttcgcgggccaaagccgagagctgcgggatctcgtagtcgcgatgcggcgtggtccaggcgctgccttgcacgaataccacggtggggtagcggcggttatcgtcatcgccggtggattgcggggcgatgatatccattaccagatcatcggccccggtcttgtacgccacgttgcgggtcagcgaggccagcccggcaagcgtgggattagatggaatatggatggcaccgtccgaaccagtgacgttttcggcggctttggatgagtcgatggtctgcatggaatccccctggttctgttgcaatacaggacatcatacagatgatacgaggccgatcgctgatgatcgctcgactaccgatacaacgccagaaatacggaacaatcggagtctcctacgccctgctcggactgtccgcctgaatgattgcgattgttggtggcgagaaacgcgtgtatctcatccctagctaccgcgagcgctgcatcccgcggatagccgtaaatcccggcggaaatcagcgggaatgcgatgcttccgcagccgagcgacacagcaagctccatcgaattgcgataacaggcgcgcagcaattgttcctcaccggcatcaccgccctgccaaatcgggccggcggtgtgaatcacgtaccgggcggacaatgcgaagcctggtgtcgctaccgcgcaaccggtgagaataggggaaagtcggtcacaggcctcctgcatatcccgagctcccgccgcacggaaaatcgcgccgcacacgccgccgcccatcaacagccgcgtgttcgcggcgttaacaatcgcatccacctgcatggtggtgatgtcctgatgcacaattcgcagtggcatgactgctatccctttattctttagaacgacggcatatcaagcgacggtgcttgacctgtcgggctagccgatgcgctgccatcgtcatgttcgcggaaccaatcgataacctgcgcctcgctcaccggcatcaagtcccatgcatccaatccgacgttcagagcctccggacgggccccatcgggcgaaagctgatgcgtgtgaccatacagcagctttcgtccgtcaaacggcagggccttaccgctgaactttgccacatcgtcgggccagctgtacgacaaatcctcccgatatgggaagtgggacagattcactatgccaagtccttcgatttcgaccgtatcgttcggctcaaggctctcgaacaggttgagtgcgggccgatcttcaagccaccaatcatcgtgattgccgatcacaccatgcaaatgcttgcaattgagcgcgcgtagacagttcttcaaatgcgtcagtgacgtgcgaaaaccgatgtcgcccagaatccacaactcatcgtccggcccgaccatcgcattgatattgtccacgatcgctttgtcgtgagcatccgtatcggctgtcgtgcggaacgtcggccccgagtccagcgtcgtctccttggcccaatcctcagcggctttgcgcccatgcgcgcgcagtatttcctcatagcttgagcgcgttggatcgaatgtcgtaaaacctcgtagcacggtgaccagcggatgcccgaaatgcgtatcggtggtgaaatacttcattgacggtcctcctgcggtgctgtccttgccgcaaccggtgcaaggacattacgaatgactccatcctaagtccataagcgccatgtgaggagtcgcaaggatggccatcagcccgtgtctgttcgtgttgccataataaggcgcattgcagaggaacccgtgaaccaagccgataccagccgagccggtacggtgccattcgcgccgagaccgaatcaatcgccgacatgcgggttgagaaaaggcataaggcctgacccttggagcctgttggccaacaccatcggagggagcaaatgatgacttttgacgccgccgcgttcggcccgatcaccttggaccatctgccgccgttcgcgcaacgactgcgcgaggccgccaacttggtctgggaggagggataccggcagccgttcctgcgcgagctgggcaacgggacgctcgatcgcgagcgcttcgcattctatctgctgcaggactaccgttacctaaacgactacgccaaggtccacgctctggccctcaccaaaacccaggatcccgaagtcatgcggttcatggccgacgtgcagaacggtatcttcaatgtggagtccgcgatgcaacgcaaatacatggcaagttacggcatcagcgagcaggaaatgaactcggttcgtcagtccgcgttcgcccgcgcctacacgtcgaacatcctttcgatcgcatatggcaatcctttagtcgatgttctcgtggccgtgctgccctgcgcatgggtgtacgccgactacgggcagcgtctcgccgccgaattcacggacacgcttgattccaacccgtacaagagctgggtggacatgtacaaaaccgaggagttctggagcagctccgcatggctgatcgaacatatcgagcagctgaccgaacacctgagcgcagaacgcaaggacgaactcgtggacgtcttcgtgaccggcgtgcagaacgaatacatgttctggtcgagtgcctacgacatgcagtacacatggaagccggaatgggatgtgtgaggaacacgatggatgagcggtgggcgcgtgccctgcgtgccaaaggcatcaatgtcggagagggcagtcaacacggctccagcgataagacggaaacagggaaattcctcgaatccaaaatcgttgcggctaagggcaagtcccgacaggcagcggcgaataccgtatctcgcgccacaccattcaaagccaccggacataaggacggcatcagtcggcaggggaattgaccctgttgcggggctgtttcgagatgaatgggctcgggatgggtgcagccaatgggctactccagcttcaaggggctgattgcgtgctttccggaggtctatctccgtttcaaggggctgatgcccaagtagatggagggcaaaaacggcggaatgacgtgggcatgaggctgttattatgcttcgtccggaggatgaccagccccttgaaacggaagtagacctccggaacggttcagatcagcccctcgaaacgtgtgttgcagattaaaacgccggtaactcggttcagagaggtacattcggcgctttgcagaatggtaactgccttcgaagaggtactttgttcgcgaaaccatgagtataatcggtcagacaccaacgccattccgccgtctctgagctgcttccacttggctcggtacccctttgaacggagatggcattccgcaagaggccaaatgtacccctttgaacggagatgtccaatatcgggctatgccgacatcatattgcgcgcagaaaatcacgaatatcagcaatttcctcgtcgcaaatggcgtgagccatgtcgggatactcgcgataggtcagaagtccggcccgttcaaggacctgatgggccgtctgctggtcgggcgcggggattgtgcggtcatacgcgccataggccagaaagaatcgggtaagggagtcaagcgccgcctgctcctcgcccatgaacgaagggctgagcagaatcgccgaatcgaacacggtcggatacgccttgaccagacggtacgacaggtagccgccttgggagaacccgataagaatcttcttacggtttgcaaacgccgaggcgtccagcaacgaggtcaccgcttcgccgaccgccgcgcattcccgttgccgttcctccacgccgcagccgtccggataccagtaattgccgcccatgtaaggccttgggtaggtggcgcggaatgagatgtaactcggcccggtctcaccatgtgcggattcagcatgattgactgagtagtcggaatcagcgaaatcagagggaccaacgggagcggacgaaactgataaatccgtatggaaccgtgccggcgcatatacagcgtcgagaatccgcaccatttcgctctcatcgttgccatacccgtgaaacatcaagaaaatcgggtcgtcgccgccggcattgattcggctcgtcatctgcagtcgcatcgtcatcacctcactcagcgagcttacatgcattcttacatgcattagacttgtatcgtttgaccgaccaagaacactcaaggagcaatcatggggccgaggcgcggggcgctgaccgcaggcgagaaggtgcagttcaccgaccgcaagggcaagaagatcaccgatcagctggttgccggcggctccacacaaaccgagcatggcttgattctgcacgatgatgtgatcggcaggatcgaaggcacggtcatcctcaccgtacacgccaaacgagaggcgcaggtcaatcaggtctaccccgaaaaggacaggaacaagccgtggaagtcctcgcgcgccatcggcggctgggagtatgcggtgatgcgcccacgtctggccgactacgtgctctccatgccgcgtggcgcgcagatcatgtatccgaaagacatcgcccaggtcatccagcttggcgacattcgctccggcatgcgcgtgctggaatccggcgccggctcgggagcgatgagcgtcaacctgctggacgccgtaggacaggatggccacctgaccaccatcgagctgcgccccgaattcgccaaggtggcccaggccaatgccacgctgtactacggcgagcagccgcaatggtgggacctcaaaaccggcgacttcgattccgtggccgccgaactgcccgaacattggttcgaccgtatcatgctcgacatgctcgatccgtggaacaggctcgaacaggcctatcgcgtgatcactcccggcggcgtgttggtcagctacgtaaccaccaccacgcagatgagccgactggccgaagccctgcgcacggccggctgctggaccgaaccgcagatccaggaaaccctcgaacgcacatggaaggcccaaggcctcgccgtacgccccgaccatcagatgatcggacacaccggtttccttgtcgtttcgcgcgccatggcccccggcttcgaggcactgcgcaaacgcgaccgcgtgaccaaggacacgtccaccgacatcgactccctcaccgaagagcagcgcgaagcccagatcgaagagctggaactgcgtgatatctccgatcacaaactacgtaaggtgctgcgcgatctcgaccgtcaggtcggccggctcgccgacaccgacgaataagcgccgaatgatgggtcgccggccgtttcgacggccctatactggaagcaatacagggccgagcagcggttcgtgaagggagccacggatgggcatcaagctgaacaaggtcgccaaggcagccaagaaatatgaccatgtcctcatcatcatgaggcatgccaaggctgagccgttcggagacaagggcgatgtcgagcgtgagctcaccgagaaaggcctcaaacaggccaaagccgtgggcaagggtgtcgaagcgctgggattggtgcccgaccggatttcctgctcgtccgccacccgcacccggcagacgctggatcgcatgctcaagacgttcggtgacaagccgatcgtcgattatcgcatcagcctgtatgacgggggagtgcaggccgtgttcgacgaactcgcccacgtcaaggacaagacccatgtgttcatgattgtcggccatgagcctaccgtgtccatcagcgcgcaatggctcgcctctgccgactccgattcggaacgtcttgatctgctgaatctgggtctttcgccggcctccatcgtgattatgggctcagataagccgttcgatgaatggcaggtgcacagtggcgaactgctcgccgtcatcaatgcgaaggacttcgactgattccatcgcgtcggctggtttccatggtccggtgccaccggtgatgatgaggcaagtccgccagcaatctggcggaccgttcgtgttttccggcatgaggtgtagtctcggctttacgcgatgacgcgaggccagtacatgatgctataagttccatctataacgacactctacgatcatttataagctgtgaatccgggcgttttgctaccctaagtcgggttacgaacgcttacattggaggattcatgtccactctgacttccgtctccggctttccccgcatcgggcagaaccgcgaactgaagaagatcatcgaaggctactggaagggcgccaacgacctggccgccgtcaaggccaccgccgccgaactgcgcgccaagcactggaagctgcagcaggccgccggcatcgacctcattcccagcaacgacttcagctactacgatcagatgctggacaccgccatcctcctcaacgtgattccgaagcgttacgagcgtctcgccttcgataaccaggaggacacgctcttcgccatggcccgcggctaccagggcgacaagggcgacgtgaccgccctgccgatgaagaagtggttcaccaccaactaccactatctggtgcccgaagtcgagtcggccgcggagatcaagctcaactccaccaagccgttcgacgaattcaacgaggccaaggcgctgggcatcgacaccaagcccgtgttcatcggcccgtacacgttcctgaagctcgcccgcaccccggaagccaccgaactcgagctcgacaagggcctggtcaacgccgtggccgccgtctacgtcgaagtgctcgccaaattcaacgaactcggtgccgcatgggtccagcttgatgagccgtacctcgtgctcgacaaggagccgggcgatgttgaactcttcaagaccctgtacaccaagatcctgtccgccaagggcaacgtcaaggtgctgctcaacacctacttcggccacatcgccgacgtgtacgagaccgtcaacctgctcggcttcgacggcatcggcctggacctcaacgaaggccgcgaggagaacctcgaagccgtcgccaagtacggcgtggcctccaacaccaccatcttcgccggcgtgatcaacggccgcaacatctggcgcaacaactacgccacctccctcggcctggtcgacgccctgaagcaggtcaccgccaacgtggccgtctccaccgcatcctccctgctgcacgtgccgttcagcaccgaaggcgagaccggcatcccggccgaagacctcaagcacttcgcgttcgccgtccagaagctcgacgagctcaaggaagtcgccgccctggccgacgccaccgaggacgagaagaaagtctccgccgccctcgccgccaaccaggctctgttcgacggcacccgcgtggccgccgacccggccgtcgccgagcgcatcggcaagctgtccgacgccgactacgtgcgtcagcctgcccgcgaggagcgtcagaccctgcagcgcgaggccctcggcctgccgctgctgccgaccaccaccatcggctccttcccccagaccaaggagattcgcgccgagcgcgccaagctgcgcaagggcgaggtcaccaaggaagcctacgacgagttcatcaaggcccagatcgacgccgtcatcaagaagcaggaggagatcggcctcgacgtgctggtccacggcgagttcgagcgtaacgacatggtcgaatatttcggccagaacctcaacggcttcctgttcaccaagaacgcttgggttcagtcctacggcacccgttgcgtcaagcccccgatcgtctggggtgacgtgtcccgcgccaacccgatcaccgtggaatggtccgcgtacgcccagtccaagaccgaccatgtaatgaagggcatgctcaccggcccggtgaccatcctcaactggtcctggccgcgcgaggacatcacccacgaggagcagaccaagcagctcgccctcgctatccgcgacgaagtgctcgatctcgaggccgccggcatcaaggtcatccagatcgatgaggccgccctgcgtgagaagctgccgctgcgcaagtccgactggcacgtcaagtacctcgactgggccgttccggccttccgtctggtgcactccgccgtcaagccgaccacccagatccacacccacatgtgctactccgagttcaacgacatcatccgcgacatcgacgcgatggatgccgacgtgatctccttcgaagcctcccgtggcgatctggtggtgctcgacgccattcacgacgcgcacttcgagaccgaggccggcccgggcgtctacgacatccactccccgcgtattccttccgagaaggagatcgaggatcgtatctacgagatccttgacaagatggacgtcaggaaggtgtggatcaaccccgactgcggtctgaagacccgtggcaacgccgaaacctggccgagccttgaacatctggtcgccgccgccaaggccgtgcgcgccaagctcgagaagtaggaccttatgaggcccccgctggcggggactgtcgccacaggcgactggaggtggtaatgacgcaattccaaccacccccagtccggcatccgccggacagccccgccagcgggggcaacttcatacgtgtagtaaggaactcaatatgcattccccgatgttcactctcgaggtattcccgcccaagcgcaacgcgccggtcggcaccatctacgacaccctcgacgggctcgagggcctgaaccccgacttcatttccgtgacctacggacatggcacccactccgaccgcaccgccaccgcacgcatcgcccatacgatcagcaaggaatacggcataccagcagtcgcccacctcaccgccctgtactccgacaaggccaagatcgacgaagcgcttgacatgttcgaagaagccggcgtgagcgccgtgctcgccctgcgcggcgattacatcgacggtgagcaggcggtcggcgaattcaaccacgccagcgacctcgtatcctacatccgctccgtgaagccggatctcaaggtgttcggcgcctgctacccagaaggccattaccaggccgacaccatcgaccaggatatcgagaacctcaagattaaggtcgatgccggagccacccatctgatttcccagttgttctacgacaatgaggacttctaccgtttcctcgacaaggcgcgcgccgccggcatcaccgtgccgatcgaggcgggcatcatgccggtgcgtggcgccaagtccgtgcgtcgcatggccgagcgcaacgcctcgcgcatcccggacaagctcaacaccctgctgaacaagtgggaggacgacatccagtccctgcgtaccgccggcatactctacgcttccgagcagatcgccgacctcgtggcccacggcgtggacggcgtccacctgtattcgatgaaccaccccgccaccacgcgccgtatctggcgcaatacggaaccgttgttcctcggtacgcaaggttgacgcatatcgcggcgcggcgcatctccatgcgtcgcgccgcgacgttaatctgctggcgaaacccagagttcccccagcggccgatggatatcatgaacgtgcaagccaaccaaagcgatggaaggaagtccgttatgtgcactggtgtccgtttctccgatgatgagggcaacacctatttcggccgtaatctcgactggagtttctcatatggggagaccatcctggtcactccgcgcggctaccactatgacacggtgttcggtgcgggcggcaaggcgaagccgaacgcggtgatcggcgtgggcgtggtcatggccgataggccgatgtatttcgactgcgccaatgaacatggtctggccatcgccggcttgaatttccccggctacgcctcgttcgtccacgaaccggtcgaaggcacggaaaacgtcgccacgttcgaatttccgctgtgggtggcacgcaatttcgactccgtcgacgaggtcgaggaggcgctcaggaacgtgacgctcgtctcccagatcgtgccgggacagcaggagtctctgctgcactggttcatcggcgacggcaagcgcagcatcgtcgtcgagcagatggccgatggcatgcacgtgcatcatgatgacgtcgatgtgctgaccaatcagccgacgttcgacttccatatggaaaatctgcgcaactacatgtgcgtcagcaacgagatggctgaaccgacttcatggggcaaggcctccttgaccgcctggggtgcgggtgtgggcatgcatggcatcccgggcgacgtgagctccccgtcgcgcttcgttcgtgtggcctacaccaacgcgcattacccgcagcagaacgatgaagccgccaatgtgtcgcgtctgttccacaccctcggctccgtgcagatggtggacggcatggcgaagatgggcgacggccagttcgaacgcacgctgttcaccagcggatattcgtccaagaccaacacctattacatgaacacctatgatgaccccgccatccgttcctacgccatggccgattacgatatggattcctcggagctcatcagcgtcgctcgatgactccttcccggctcatgccccattcggaagggcatgagcgtatatagtggaatcttatggaatcgtcgatgttcaaacccagctccatggacctcatcagggcaggtctgcaagacctcgacaaggcccgcatcttgttcgaccagctcaaggcggacgacattcccgatgagcgatgcgccgaactgctgagcgtgctggcccacgcctgcgaccccgatgtggcattgagcaatttcgtggatatcgtcaacgcgatgcaatccagccagcgcgatctgaaacacgtcatccccgacaacaacgccctgaagcgtctggtcacggtgctcggcgtttccgacgcgatgggcaagttcatgcgcttcaagccgcagcttgtggaggccgcagcagtcgacaactgcaacagccatctgttcaatcacgcgcaacgccgtgcacgtctgctcaaggcggtcggcgcggacccggacgaaccggccatgcccgtcgcctccaaggatctggccgaagcggccacggccttgcgttccagctaccggaaccaactggccgccatcatcgcccaggatgccgtggcggacgacccgacctccatccaaccgaccatcagccgcgaactgtccgacctcgcggacgcggcactcgaaggcgcgctggccatcgcccgtcacgaaaccgagggcagcgagcatgtgcgcttcaccatcatcggcatgggcaaactcggcgcacaggaactgaactacgtttccgacgtggacctcatctacgtggtcgaaccggtcgacaaggacgtggaccatcagacgctgattcgcgtgggcaccaagatgggcaccatgctgcagcgcgtctgccagtccgccatcatgggcgtggccgagcagccgctgtggcagatcgacggcggcctgcgcccggaaggcaaggacggcgcgctggtgcgcgtgctctcctcgcacaagaactattacgagcagtgggccgagaactgggagttccaagcgctgcttaaggcccgcccggtggccggcgaccccgacctcggccaggcctacatggacatgacccggccgttcgtgtggagcgcgtccaagcgcaagaacttcgtctacgactgccagaaaatgcgcaagcgcgtggaggatttgattcccgcacccctgaaggaccgcgagattaagctcggccgcggcggcctgcgcgatgtggaattcaccgtgcagatgctccagctcgtacacggccgcaccgacgaatcgctgcgctgcagcaacacgctcgactcgctgcagcgcctgtccgaaggcggctatgtctcgcgcaaacaggccgtgcgcatgtcccaggactaccgcttcgagcgcgtgatggaacatcgccagcagatctggtccctgaagcgcacgcacctgttcccggacctcggccgagcctcggtcggaggcctcgaaaagaagcgcgacatcgacgtggacgagctcaaccagaaccaggagctgcgccgactcgcccgcgcattcggcctgcacccggaagaactcgtcgacaaatatgacgacacccgtcgcgaagtgcgccacctgcacctcgacatctactatcgcccgatgctgccggtcaacgcccagatggagaacgaccagatcgtgctgagcgtcgaggcagcacaggaacgattcgaatccatcggcttcggcgacccggacgccgccatccgccacgtgcaggcgctcaccgccggcgtggggcgcgcggccaaaatcaaccgcatcatcctgcccgccgtcttgcagtggttgggcgagggccagaacccggacatgggcctgctcaactggcgcaaactggaggagaacttcggcaccgaatccggctacctcggcttcctgcgcgactccacctccgccgcccagcgcctgtgccacatcctgtccaactcgcgattcctgggcgacgcgctcaacaagtcggtcgaatcgatcagttggcttggcgacgacgacaatctgcaggcccgcacgcgcgaggccttggacgtgcagaccggttcggcgctggaacgcttcggctcgaacatcaacgagttcgccacctccatgcgcgccatgcgccgccacgaaatcgaacgcatcggcctgtcctggatgagcggcgtaatcagcgattccgacagcctcaaagccatgaccgacgtgtacgacgcgatcatcgacgcctccctgacctgggccgtgcgccaccagatcgccgcgttcggcgtcgaaaccgcgccggccggcatcaccgtcatcgccatgggccgttacggcgggcgcgaagtgaacttcagctccgatgcggatgccatcctcatctaccgtccggcagacgacgccgacgacggccaagccaacgctttcgccaaaaaggtcgtggaagacctgcgcaacattctgcaaggcccgacgacgctggagcccaagatcgaactcgacctggacctgcgcccggaaggcaagaacggtccgctcgtgcgctcctacgcctcctgcgaggaatactacgaatcctgggcttcgacctgggagcgccaggcgctgctgcgcgcccggtacgcagccggcgacgccgaactggcgcgagacttcctgatcaacatcgccgacccgctgcgctacccgaccacggagctgaccgaggccgaattgcagaacatccgcaagctcaaggcccgtatggaggccgagcgtctgccgcgcggcgtgcgtcgagaacgtcatctgaagctcggcaagggcggcttgtctgacgtggaatggaccgtgcagctcatgcagctccagcacgccggcgatatcaaggatctgcgcgtcaacggcacgttggaggcattggacgtgctggaatccaagaagcttatcagcgctatcgacgcgattcagctgcgcaaggcatggacgttgtgcaccgcggcccgcaacggcaactatctgtggagcgggcgcgccaaccaggccgatattctgcctgatgacatctattcgctgggcggcatcgccgtctacctcggctacggcgcccaccgcggccagcatttcgagaacgaccttttggccgtgatgcgcaagtgccgtgacgtctgccagaggctgttctacggtcaggttgacgaagatgcccagagcggcggtacgcgtatgcatgtgctggcaccgcgattggagcataatcgacgccttgcacagcggtgaacgccacaagcttcacattcattaggtcgatttgccgttcattaggtcagtgtttcacttcatacggtgttggaatggcgccattccaacaccgctctacagaagtaaccgacctaatgaacggcaaatcgacctaatgaatagttttttctgcatgcttcaccacgcaaattcagtaattcattgttcccaagggtgaacactccgtgaacgcggctgtccgaaaaatggcgtaagttaaattaggtcacacaagagtggccacctgaaaccacgagcgaaaaggtgagccttgtctgaagaaacacccatggtcggcaaaagcgttgtgacgctggacggcctgtcaacaaaccagatcctcgatattctgcataaggccgcatatattgacggccatcgtaaggaagtggctcacgcttgtgacggacgcgtgctcgccacattgttctatgagccctccacccgcacccgtttgagcttcgagaccgcaatgctgcgtctcggcggcaaggtcatcggcttcgccggcgcgcagctggcctctgtgactaagggtgagtccattgccgacaccttgaagaccgtgtccaactatgtggacgtggtggccatccgccatccgaaggaaggcgccgctttggtggcctcccgcgccgcctccgtgccggtgatcaacgccggcgacggcggtcatatgcaccccacccagacgctggccgacctggccacgctacagtcgcgctttggccgcatcaccgacctgaccgtgggtctgtgcggcgacctgaccttcggccgtaccgtgcactccctgattgagaccctttgccgcttcggtaacgtgcgcttcgtgctcatcagcccggacgagctcaagactccgcagtatgtgatcgaccgcatcaacgctacgccaagctgttcctatgtggaagtgcgtgacctggcctccgtgatcggcgacctcgacgtgctgtacatgacccgcgtgcaaaaggaacgcttcttcaacgaagacgactacctgcgtctgcgcgatacctacattctcgacgaagagaagctgcagctcgccaagccgtccatggccgtgcttcacccgctgccgcgcgtcaacgaaatcgccgtggacgtggacgctgatccgcgcgccgcatacttcgagcaggtcaagaacggcatgctcgtgcgcatggccctcgaaagcaccgtggtgggcgacgaactgcccggatacgagccgctcaaccccaaggaggttcaggcctgatggaagtcaccagcatccagaacggtatcatcatcgatcacgtgccggccggcacctcgctcaaggttctcgactatctgaagatcgacccatccaaaaccaagctggcactcatcatgaacgccgactccaagcgctacggttccaaggacatcatcaagatcgaagatgacaaagacatcgacctcgacgtgctcggcttcgtggcccgtcaggccaccgtggatgtggtgcgcggcggcaagatcgtcgaaaagaaacagccgaacctgcccgaacatatcgtgggagtgatctcctgtgtgaacccgcgctgcgtgaccaccaccgagcctggcatcaagcagatgttccacctcgtgcactccgaacggctcgaataccgctgcgactactgcgacgaggaagccaaactgtgagcataaccctacgcaacatcaaggtctggaacaccggagaaatcatcgacctcgtggtgcccgggaccgctgccgcctacttcgccgacaccactgccgtggctgatggtgccgacatcgatgccaccggcctgaccttggctcccggattcgaggatccacacgtccacttccgagatcccggccagacatacaaggaatcgatggtctccggttgccgtgcgtcggcgtccggcggatacacgaacgtactcatcatgccgaacacgttgccggcattggacggccagaccgttaccgatgcttccgctcccggcgcgaaggaagttctggacgccggcttcgacaacgtcatcgacttcctgcagcagtacgatgccgcgcataatgtgaagctgccggtccgttacgacctgtgcgtgtgcgcgtccaaggatcgtgccggtcacgaggcaagcgatgttgccgattggctgaagtatgtgcccggctttgaggacgacgccaagacaccggccatgctggcccaccctgtcaccgcagtaagcgatgacggttccgccgtgcccccggagattctggatcaggtgctggagaacgtcaagacttccgatctgtatctgattgaacattgcgagcatcacgatacgggtgccgtcaacgagggaccggtttcccgcgaacttggcgtacccggcattccggaagacaccgaactcaagatcgtggctcgtgacatcgaagcggcccgccgcaccggtgtccacgtgcacttccagcatgtgagcaccgcgatttcgtttgaagctattcgtaaggccaaggctgaaggactgccgatcacttgcgaaaccgcgccgcattatctggcattgagcgatgaggcgttgctcaagtacggcacattggccaagatgaacccgccgctgcgctctgaagcggatcgcaaggccaccatcgcggccatcgcggacggcacggttgacctgctggccaccgatcatgcgccgcatacgttggaagagaaggaactcggattccttgaagcgcccaatggcatcatcggccttgaatgcgcgtacggcgtgtgccacaaggtgctggtggacggcggcttcatctctgatgagcgtttgattgagctcatgtccgtggggccggccgaactcatgggtcatgcaccgaccgatgtggctgcgctggtcgaagactatgcggaacccgcgcctaccggtgaagacccggatggtgtgattgcgggggagcaggtggccgacgccgccgaatccggggcttcgcagcgtgaaggcgtcaaccggctgcttgatttcagtcatgtggacgatgccgatgcggtcgacctcgtggttcttgacaccgccttggaatggaccgtggatcccgagcagttccactccaaggctcgtaacacccccttcggcggctggcaggtcaccggacgtcccctcgccacaatcatcggctccaagctgatgttcagccgtttgtagacaacacaaggagcagcatggatcgcctaatcgaagctatcgacaacacccagaaccccagcgtcgtgggccttgatcccaccgaggcgttggtgccgccgcaggtcgtggcgagctttgccgacgaggtacgcgattccgtggaatctccggaagagctcgaatccgctcagctggccgtcgcctacttcgaatacaaccgcacgattatcgacgccatcgccgatatcgtgcccgccgtcaaaccacagatcgccatgtatgaggcgcttggcccggccggcgtggacatctacacaatgacctgcgaatatgcgacccagcaaggcctctacgtactcggcgacatcaagcgtggcgacatcggctccaccgcggccgcctacgcccatcacctgaacggcgtgggcgatttcgacccgtggcatgaggacgcggtgaccgtcaacccgtatctcggcaccgacggcatcaccccgttcgtcgaggccgccaccgaagcggacaaggacatcttcgtgctcgtgcgcacctccaacccgtcctccagcgaactgcagatgcttgatctggccgacggcacgaaagtctacgaacatgtggccgatctggtggaaggctggggtgccgagaccattggcgaccacggctactcccgtgtgggcgcggtggtcggcgccacacatccggaagaaggcaaggcactgcgcgcgcgcatgccgcacacgttcttcctcgtgccgggctacggcgctcaaggcggtactgccgcggatgtggccggcatgttcgatgagcagggcagcggcgccatcgtcaactcgtcgcgcggcatcatcggcgcgtggaagaagaacggcaaatactccgaatccatgaccgccgacgaggcgcttggcttggtggcggacagcgcacgccaggcggcactcgacatgcgcgataatctgcgggttgccgtataccggtaagtagacgagtgtactcccgcccccgctggcgggggctgtcggcaaagccgactgggggtggccagtcgtggtcatagaaaaccaccctcagtctcgcttctcgagccagctcccgccagcgggagcaatgcagatgctgaataggaacaacatgacaactttcacccccactcatgatgtggttgcggaggcgactgcggccggattcttcccgccgcgtcacaacgttgaaatcacacaggttgcggaactgaccgaccgcgtgatgcgattgacgttccgcgacccgttcatcgtctcccacgccaagcccgcccagttcgtcaacctgttcacgcacgacgacttcatgctcatgccgcgtccgttcggtgtcagcgaggtcaacggtgatgaggttagcgtgatcttcgccgtagtgggtcacggcaccgaacagctggcacagctgcaggccggcgacaccgtggacgtgctcggcccgctcggccgcggcttcaacctcaaggaagacgccaactacatcctcgtcggcggcggtcttggcgtaccaccactgatctacgccgcgcagaggctctccgagcacgacgcctccttcgccaccgccgtcttcggctatcgcaatgaccacttcgccgaggaatacgtttcccggtacgcggactggtcgtggagcatcgatgacgccgaaggcaacgtagtcgacctgctcaacaagctcgaacaggacgacgatttgaaagcctacgatcgcaaaccgatcatcctgtcctgtggaccgctgccgatgatgaaagccgtggccgcatgggccgccgaacgcgacatccccgcgcagctgagcatggaacagcgcatgggctgcggctacggcacctgcgtgctgtgcaccatcgacaccgtggacggccgactcaaagtctgctccgacggcccggtattcacccgcgaacagctcggatggggggagtgacgatgagcgcaaacaaccagtccgcgcagggcaacgacaaccacatcaacctgtacgaaccccacgtgtggaagcaccacactaaggtggccggtctggaatggaagaacccggtcggcaccgcctccggcacattccagtacgccgccgtccgctggttctacgatgtcagccagctcggcgccgtatgcaccaagggtgcatcgcccgtgccgtgggaaggcaacccctcgccgcgcgccgctgaatcgccggccgcgaacatcaacgccgtgggcctgcagaatcccggcgtcgaccactatttggccgaagacctgcccaagctcaaggccgcgggcgcattcgtcatctccaacgtcgccggacattgtgacgacgactatgccgaagtggtggaaaagctcgccgactccgacgcggacatgctggaaatcaacgtcagctgcccgaacgtctccgccggcggcatgagcgtaggcgccgacccggtggccctcgccaatctgatggaccgtctgcgcccattgaccgacaagccgatgatcgtcaaacttacgccgaacgtcaccgacatcaccgtgccggcccgtgcggccgtggaacatggcgccgacgccctgagcatgatcaacacgctcaaaggcatgcgtatcaacattcgtaacggcgagccgatcatcgccaacgtcaccggcggcgtatccggtccggccgtattgccgatcggcctggccgccgtataccacacacgcaccgtgctgccggacattccgatcatcggactcggcggcatcgacagcggcgaaaaggcgctcgaatacctgtacgccggcgcgaacgccgtcgaagtgggcgcggccgcgctcttcgacccggtagccccactgcgcgtcgcccgcgaactggacgacctgctggacagccgtcccgaactcgctgctaaactggccgcaggacagacttggaggtaaatcatggcagaaacactcgcacatcgtttcacggaattcctgttggaatccaatgcgttgaagtttggcgacttcacactgaagtccggccgtaagagcccgtacttcatcaacgccggcgcgttcgacgacggcaagaagatcgccacgctcggcgcgttctacgctgagaagatcagccaggccatcgtgcacaacacgattccccgcaacatcgacaccgtgttcggccccgcctacaagggcattccgctggctgtatccactgcgatcgcactgaccgccggccacaacatgaccgtcggctacacgttcgaccgcaaggagaagaaggaccacggcgacggcggctggatggtcggcaccccgctgaccgacggcatgaaggtactgctcgtggacgacgtgatgaccgccggcaccgccgtgcgcgaagtcatccccaagctcaaggccgaggcgaacgtggaagtcgtgggtctggtactttccgtggatcgcatggagaagaccaaggactccgacttgtccgccgtcaaggccgtggaagccgagttcggtttcccggtgcttgccatcgccaacgtacgtgagatcttcgacgccgctgccaagatgaagaacgccgacagcaccccgctgctcagccacgacatccagcagcgcgccgccgcctacctcgaagaatacggcgcctgatcgtcttcaatctaaaaccaaaagcgggcttgcgatcccgctttttttattacgattcatgaacagcagcaccatattaaggcaaaagctttggcaaggagcatgctatgaactggttagttggtatagggctgtttgcgctcgtggggatatgcagttacttcggtatcgagcatcatctggacagcaaagcgaacaagttgtcgcaaggtaatgaagaagaccgccgagatgctgccgaattacgtgatatcgccgccaaaatcgatcacggcaagtattacccgatgctgtaacaggcaatctgggcctaaattgatgatatctccgtttcgaggggctgatgtcgtggtttccagaggtctacttccgtttcgaggggctgatgcccaagtagaagtagcatgaaaatggcggaatgacgttggtgtgatgccgcttatactcgggatatgacggatgaacagccccttgaaacggagataaatgtctccagaaggccaaatcagccccttgaaagcgagatagggttctaaactctgggaccgactcgcctgtgatgaaaacccgcgcggcgtagaattaccgtaggttcgttgcattcgaacaaggaaggccgctatggggaacatcaccgacgatattcggcaacatttcgacactttcgccgaactgccgttcaccgaggcggacagcctcgctttgtcccagttggcctatgcgcgcatgccggataacgtgccgcgctatcacgagaatgcagagaccactgacggcgtgattgccacggttccgattcacgatttgctgcgtgccgaatgctatgacgacatgttcggcaaggtgtggtcgccttcgatgaacgtcgatctgttacgtgcgatgagcgagagcccacgttggaggaacctacgcgtaggcgcatacgtggacgaattcgatgccgaaaccaccaagcagttctcggcctgcgtgttcgaactgggtaacggcacgctctatgtggcttttcgcggtaccgacagctcgatcgtcgggtggaaagaggacttcatgatggcgttccgccgcccggtcgcctcgcaggaggccgccgcgtgttatctgaccgagctggctggccattgggccgggccgattatggtcggcggccattccaaaggcggcaatctggcggtgtatgcggcggccaatgtgcctagcgagattcaggaacgtatcgcggtcgtatattcgcacgatggacctggattcgatgaggcgttcttcgatgaagacgggtacgtacgcattgcgtcgaagatccataaatcggtaccgggctcgtcgattatcggcatgctgtttgagactcgtgagcatgtggaagacggctatacggtggtcagcagcgatggagccagcatcatgcagcatttcgcattgcactggcaagtcgatcatggccaattcgtacaggctgatggactgacaagtagcgcgcaatacctggcacgcacgatcaacggatggatggcaaaatacgacgacgagcatcgccgcaagttcatcgaaaacctgttcgcgatcttcgaggccggcggatacgccacattcggcgacctcacttcgcatttgacacagtcattgccggttatgctcgccgcggcccgcaacattgatgtcgaagatcgcgacgtgatgatcgaagtgctcaaaggcttcgccgcgacagccgccacgtcggtaatctcggccaagtagtcggaggccatcaaactggttttgccagtcagtctcaatagcgcaagagccggcccctgagatactcagggcgtccggctcttacttccatttcccccagcggggttggcttaatcgcagtgtatctcactgctgaccatgcctgttttacttactcctaatcaatgagtttgtagccgtgatcggcgactacggacttgagcttggtgaggtaggtttcggcggccttggagagcttggagcgctcgttggtgatccagccgaccagcatcgtctcatcggtgtcgagcggcacggtgacgatcttctcgttgttgaggtcgccgttgtcgatgccggtgcacactgtgtagccgttgaggccgatgatgaagttcaggatcgtggcgcggtcggtcacgttgatttgcttgggggagtactccggccagaccgcttcctcatagaagtagaacgagccttcctcgccctgctcgtactggatgaacgggtatggcttgaggtcctccatggtgatgaccttcttggaggccagtgggttgttgcgcgagatgaacacgtgcagcggcgcacggaagagtggatggaattcgaggtgcttctcgcgcaggagcttgccgatcacatccttgttgaaatcggacaggtagatgatgccgatttcggactgcatgttggcgacctggttgatgatgtcgcgcgtacgggtctcgcggatggtgaactcgtattcgtcggacttgatggagttgatcatctccacgaacgcttcgacggcgaacatgtagtgctgggtggagacctggcacagctgcttgcgcggcttggcgtgcttgtaacgctcttcgagcagatcggcctgatcaagcacctgacgggcgtaggtcaggaattccgcgccgtccacggtcagggcgatgccctgcgaggagcgggtgaaaatctcgatgcccagctcgttctccagttccttgaccgacgagctcagggccggctgggagacgtacagagcgtgggatgcctcgttcatcgagccgcattcgacgattttgacgatgtatttcagctgcagcagtgtcataaggtctatttatagcctgagggatagtcgggagaagggtttatagccgtactccgagctgggcgagggattcgcgtgcctgcagcgcgttttcgaagagaagtccgtggatgccgacttcgttggctccgacgatgttcttggcggtgtcatcgaagaacacgcagttgccggcggtcaagccaaagtggttcaaagccagctcgtagatgtcggcgttgggcttgtgcattttctccacgccggagaccaccgtgccctgcagcagttcctcgagacgcgggaatttttcgaatgccagatggaacgtctcgtgagaccagttggtcagcccccacacgccgtagccatgggccttgagatcttcgagcaactcgaccatgcccggcagcgtgcagggtagcgcgtcatcatagtgcgcgatgtaatattcaaagatcgcggcaagctcatcgccttgttcacgacggacgtcgggcaggatatcggccagatcctcgccggcatccatgcgatcctcgtaatggaaaaagccacatggatcatcgttggcacaaatacggttcaccacgtcgtcgggaaacttaccttcgaggcatgcgcgggtattccagtccagcagcacgccgcagaagtcgaaaatcacatcggtgatgggggagttggccatgatgctccttggtttgtgggctatcttcagtggttcctgtaattagtgtacgggttgattgcccaaattggggtacatggagtttaattcttggctcaacctttgccaggcttttctctccctccgtcttggcttcgccgatccacctccctcatcagagggaggtcatattattcggcgaggccgagaactacgcaattacgtcggcgatggcttcgggaatcgcgcgaatcacgtcaccggctacaatcgggtgtccgagcgtcatgaagcgctgatgatgttcctggcccaccagttccggttcctgccagccctgctgctcggattccgaagcgattgcggcggccatgccatgcagataggccgcggaggcgacggtctccgctgtggtaatcaacgcatcctgctgggcaagcaaggcaccggtaagacctgccagcacatcaccggcaccagcggtggccagccatgccggcgcgctgccagaaacatagacatgatcctcgtccaccacaatggtcaccgcgcccttcagcagcacggtcgcaccggtcagctcatgcgcacgcagagcacaagccaacagatgaatctgcacatcgtcaacggtgtaaggttcacgcggctcagcatgttcggccgcatcctgccgcacttccagccgattcagcaacttggccatctcgccggcgtgaggcgtaatcactacctgccctggcacacgttcgggcaacaagtcaagtgcgccggcatccaccacgattggtggcatgtcataagcattgccggcatcgtcttcagcagacgcatcataatgcttgagcaaggccgctatggtttcgcgttgcatatccgtgccggcaccatcggcatcggcatccggtacaccggagccgacgacccaggactgtacatgtcccttgccgatcacggcttccggcagcgcggcaagcaccatattctgggcacgttccggtccgagatagcggaccatgccggtattcgcgcgtgcggccgcacgggacgtcagcaccgcggcacccggataggactgagaaccagtgaccaatccgaccacgccgcgtgaatacttgccatcctcaaaacgaggaagacgaatcgagtcggcggcaaaggtgttgttcacgacttcgaccgcaggttcacgctcgtcaatatcgaatccaaaatcgaccaactcgatacgaccacacgagaacgttgcgggaggcagcacggcgcacggtttcatcgcaccaaacgtcgccgtgaccgtagccggaatgtacgggccgggcaccgaaccgtcgttgaccccgatgccggacggcgtatccaccgcgagcaccagcggaaagtcaccggacgattcgcggttgggaagagccggctcatcagggacctcaccgtcaagacctaaggcggaagccaacgctgcggggattccacgcaatgcgccttcgatgccgatgccggtcatcgcatcgataatgagatgcgaccgctgagccacagacaccgcggtttgcaggcgttcacccgcctcaccagcggagaagccggacgaacagccgggaatttcggcggctggatcaagtaccaagactttgccgccagcgcgaacgaatgcggcgaatccggcctcatgcaacgactggcccacggctattgcagtaaccttggcaccctcctgtgccagagcggcggcggcgaacagcccatcgccgccattgtcgccggccccggcaagcagcacgatggaagtatcctcgagcgccagatcctcgtcatccagcatgccggcggcaatatgggctgtggcctgtgcggccatgcgcatcagcggcacgcccttatccagcagcggacgttccatatcccgcaccgtgccggagtcataggcactatgcaataacagttcacggcgatcgacgtcatcggcgtattccatggcagacccctttgcggtgcttacgaacgaacaccattgattttagcccgtttgccgagtcacgccgatagcaaacatgaacattcatgctgtcgtccaccttcttcatggcttccgttactatggtctgttggtttaacaggactctatacggaaagcagcaggtgaagcatggcgatcgaggcacagggtctggagattcagatcggcgcgcgcaccctgctccatcccaccaatttccatgtggccaagggagacaagattggtctggtgggccgcaacggtgccggcaagaccacgctgacccgtgtgatcaccggcgacatgctgccgaccgccggcaaagtacgtgtttccggcaagcttggctacctgcctcaggacacgcacgcttccgatcccacgcagactgcgctcgaccgcatgatgagcgcgcgtgacatcgccaccatcatcaaccgtatccgcaaggccgagaaggaaatgaccgacccggatccggacgtgatgaccaaggccatgaaccgttacgacaaggccatgcaggacttcgacaaggccggtggctatgcggcacagtccgaggcgatttccatggcgacttcgcttggcttaccgcaggaggtcatggaacagcaacttggcaccctgtccggcggtcagcgccgtcgtatcgaactggcgcgaatcctgttctccgacgctgatacgttgattctcgacgagcccactaaccatttggacgcggactccatcgaatggctgcgcggctacctgaagaagtacgagggcggcttcctggtcatctcccactccacggaattgctggatgaagtggtgaacaaggtgtggcatctggacgcgcaactcggccagatcgacatgtattcactgagctggaaggcctatctgcaccagcgcgtggttgatgaggagcgtcgccgccgtgagcgtgaagtggcggaaaagaaggccgaacgcttgatgaagcaaggcattcgtctgcatgccaaggccaccaaggcggtggccgcgcagaacatgatgcgccgcgccgagaaactgctggagaacacctcggaggcgcagaaggccgagaaggtggcggatattcgcttccccgagccagcaccgtgcggtcgtacgccgattatggccaaggatatttccaaggcgtatggttccaatatcgtgttcgccggcgtgaatctggctattgacaagggctcacgtgtggtgattctcggctacaacggcgccggtaagaccactacgctgcgtctactggcccacatcgaggaaccggacaccggttctgtggaatacggtcacggctgcaaaatcggctactttgcgcaggagcacgatacgttggatctgaacgccactgtattagagaacctgcaacacgtggctcccgagctcgacaacacacaggcccgttctattctcggctcgttcctgttctccggcgatgacgcgatgaagccggctcatgtgctatccggcggtgagaagacccgtctggccttggccacgctggtcacctcgcgcgccaatgtgctgctactcgacgagcccaccaacaaccttgatccggcctcccgcgaggagatcttgaaggccatcgccaagtacgagggagcaatcgtgctcgtcacccacgatgagggtgccgtcgaagctttgaaccccgagcgcgtgctgctcatgcctgacggcgacgaagacctctggaatgatagttatttggatctggttgccgaagaatagtcccatcttggctccctcgctgaggggagtgacctaacgaaaagcaaaggagtcacctgccatggccaccacaacaggcaagagcatcgccatcgtcaccggtagtgccttgggcctcggctacgaactagccagccagctcatcgacaaaggctggctcgtagccggcatcgatttcaacgccgaacgccaggccgagctcaccgcacaatggcccgctgattcctaccgtgcctacatcggcgacatcacggatgaagcgttcgtcaaggaatccgtggcggatatcgcctcacttggccacatcgacctgcttgtcaacaacgccggtcagccctcgttcaaagtacccaccgcttacgaagccgccgacgtcgacaaatgcctcaagggtcttaaaggtatgatcctgtggaccgtggaaaccctcaaggtctgcggcgaacgcgacgtgaaaatcgcccagatcatgagtactgccgccacgcgtggcaatgcgaacgagagcgtgtattgcgccaccaagtggggcgagaagggctacaccaagagtctgcaggccgcatacaagggcaccagcgtcaaagtggtcgccatctatccaggtggcatcgacaccgccttctaccgcgacagccacgattacgtttccgaagacaagcagcacaccttcatgcagcccggcccactggctgaagtcatcctcttcaacctgatcaacgaggccaacctcaccgtcaccgacatcgaaatcaatcgcaacagctgactgtcaaaataatcagccaagagccaccggaacctcgtatcggaatcggcggccggctcattcacacgccagtagccgatatgaatgatattttccgggctggtggtggagcaggccattgaccagaaggttttgatgccgcgtgcggccatcagagccatcttcgggttggcaagcaccgcctgttcgtcggcttcccaggtctgttggatagtggcgtcgcccgagtcgatgtaatgctcgaagctttcccattcgccaagccagtcagtgatgtcgaaggacgtggaatccgtggcggttgcggaagtcattgattgttcctttcagagacgttggtggagtttgcagagttgatggagttaccgacgttagaaccatcggcatcgaaatggccggtttcaagattgacgatgcagtcgcaccaaccggcgggcagaattcatcaggcgataccggccttgatgaagtgcttcttcatcatgcgctgaccgaaccagccgccgagaatcgcgcataccagaatcgcgatcatggagatgaagaacgtgccggtgttgatgttgtcgaacacgccatcgatgtatgccgcgtccctgccacgcgcctgaaggctcgccgcgtaggcgtccttcatgaaccacaagggcagaatcgggccggtcaggccgtaggagaacaccacatagctgacgagcagcagcgccttgctcttgtatttgccggcgctggcgatgagatcggcggccaccgggaatacgatgctggcgataaacgaaagcacgaaatgtccggaaatgaaaaggaacaggccgatgatcacgcccatgacggtgatgccgccgaacttgccgagtcgcgcggccagcagcatgtacacgcagccggagatgagggctgcaatggcaggcaggaagatggagccgaagccgccggtaacagggtgcttaccagcgtggcgatgcacaccatcacgaagtacagggccgcgaatatgccgatggtgatgaggtcggagacctccagtttgccggagttggcgggtttgctgggctggtcggaggtttcggcgggcgtgttcggcgcggtcacgatgttttccgttttatatgattgacagattttcctctcgccaatctaacgatgattccacgcaaaggcgataccttttcacgaagttattagtgacttcaatcattcgtgtccatgatgcacgcggaataacaaaatcgtccggcatcttcacgacaccggacgattcaagaaactaacggtctgagccctcagagcccatacacctcgtgggcgaacttctcgaacacggggatcgaacgcttgaccttctcggtgtcgatgcagtaggccatgcggaagtagccgggcacgccgaagctgtcggacggcacgaggatcaagtcgtatcctttggctttcatgcagaacgccacggcgtcgtcctcgagcgccttggggaagatgtagaacgtaccgctgggacgcaccacgtcgaagccgatgccggtcagcgcatcgtagagcaggttcatgttcgtctcgtagacgttgaggtcggcggtctggtcaatgaccttggccacgcccagctgaatcgagctcggcgggcagttgtggccggtgccgcgcgagatctggcccatcatcggcaccagcagatcggcgtcggtcgcgtccgggttaacggccacgtagccgatgcgctcgcccggcaggctcagtgacttcgaccaggagtagcaggttagcgtgttcgcgtagaagctggccggatagggctgggtaccgccgtcgaacagaatctcacggtacggttcatcgctgatcaggaagatgtcgtggccgtattcggtctgcttggcggtcaagatcgcggccaggcgcttgagcgtgtccgccgaatacaccgcgccggacgggttgttcggggtgttgatgagcacggcctgcacgttcgggttgagcgcggcctcgaacgcctcgaagttgatctggaagttctcggtgtcggccggcacgatggtcagcttggcgccggtgcccttgacatacggctggtattcggggaagtagggggcgaaggtgatgatctcgtcgcctggcttggtcaccgcgcgcatcgcgtgggacagcgcgcccgccgcgcccgtggtcgggaagatgtggttgccggtgtatgccatgccgaaacgttcgttgaggttctcagcgaccgtctctttgaaggacgggatgccaagcgagggggagtagccgtggatggccaccgggtcgccattctcatagaggtcaatcatggcgtcggcgaaggatttcggggccggcacggagggattgccaaggctgtaatcgaacacattctggtagccgatttcggcaccgcggctcgtggcatactcgctcagctcgcgaatcacggacttgccgccaagcatggccttgtattcctcattgatcatggcattctcctcgtatatacgtactgatgcttatcccactactaccaccatgttccgttttgtgccatctgccgcgccggacacacccatcgaacatgtgttcgaatttggtcgtgtgttcgggtattcttgggacaggctttgatgcgtgcggtgtgatgcacgtggaaaacagcgagacggaaggcggggattgtggcggcagcgcagactggcacaaagcgcgcaactggcggagcgggcgcgaaaaccggcaagggcaagaacggcgaagtcatcgtggaaaaggtgatgaccagcgactcattcctgagccgcgaaatcaaaaaagcgccgctcgtcgagcatgacggttcgctggtagcggacatctcgcacatcccaaacgacctcaagatcaccattcagggcgcacgagagcacaacctgaagaacgtggatcttgcgattccgcgcaaccgcatggtcgtgttcaccggcctgtccggttccggcaaatcatcgctcgcgttcgacaccttgttcgccgaaggccagcgccggtacgtcgaatccctgtccgcctacgcccgccagttcctaggccagatggacaagcccgacgtcgacttcatcgaaggcctgagcccagccgtctccatcgatcagaagaccaccaaccgcaacccgcgttcgaccgtcggcaccatcaccgaaatctacgattacctacgactgctcttcgcccgcaccggtattccgcactgccccgaatgcggcgagccggtcgcctcccagaccccgcagcaaatcgtcgacaccctgctcgattacccggaacgcacgcgattccagattctcgctcccgtggtcaagggccgtaaaggcgagttcgtggatatgcttgaactgctgcgctccgacggttatgcccgcgcgctcatcgacggcgaaatgaagcagctgtccgacgacatcaaactcaccaagcagaagaagcacaccatcgaagtggtggtcgaccgacttgtggtcaaggacggcatccgccagcgcctgaccgactcggtggaaaccgcgctgaagctcgccaacggcagcatcgtcatcgacttcgtggacgaggaggaagacagccccgcgcgccgccgcccgttctccgaacaccgcagctgtccgaatggtcatgtgctcgaactcgatgaggtcgaaccgcgcacgttctccttcaacgccccctacggcgcctgcccggcctgcaccggtctcggcttcaaactcgaaatcgacccggagctcgtgatctccgacccggataaatccctggccgacggtgtcattgagccgtggagcggcaccaagatgacctcccagtactacggccatatccttgaaggtctggccaaggaaatgggcttctccatgaagaccccgtggaaggatctgccggccgacgtcaagcacgacatcctctacggccatgacttcaaagtcaacgtctcctaccgcaaccgttggggtcgcctgcgcgaatactccaccggctttgagggcgtggtgcgcacgctgatgcgccgccacgacgaaaccgactcgcagtccatgcgcgaatactacgagtcctacatgcgcgaggtaccttgccaggtctgccaaggccgccgcctgaagcccgaagtgctcgcggtcaccgtggatggcaaatccatcttcgacgtgtgcgatatgcccgtcgtgcgcgaactcgcctgggtcaacgggctcaagctcgaaggctcggcacagatgattgctggcgaagtcctgaaagagatcaaggcgcgcctcggcttcctcaatgacgtcggactcgactatctgaccctttcacgcgcggcagccaccctgtccggcggtgaagcgcagcgcatccgactcgccacgcagatcggctccggtctggtcggcgtcatgtacgtgctcgacgagccttccatcggcctgcaccagcgcgacaacgaacgactcatcgaaaccctgcaccagctgcgcgaccttggcaatacgctgatcgtggtcgaacacgatgaggacaccatccgtcaggccgactggctggtcgacatcggccccggagccggcgagcatggcggcgaagtcatctactccggcccagccaagcatctcatcgaggcgaagcgttccatcaccggcgactacatcgcccaccgtcgcgaaatcgccgtgcccgccaagcgccgcaaggtgcgcaagacccagatgctcaaggtcgtaggcgcacgtgagaacaacctcaagaacatcgacgtgagcttcccgctcggcgtgctcaccgtggtcaccggtgtctccggctccggcaaatcctcgcttgtcaactccatcctctacccagtgctcgccgacaagctcaacggcgcacgcatcgtgcccggcaagcatacgcgcgtcgaaggcgtcgaccaggtgcgcaaagtgatccacgtcgatcagaacccgatcggccgcactccacgctccaacccagccacctataccggcgtgtgggacaagattcgtgcactcttcgccaaaacccccgaagcacaggtgcgcggctacggccccggccgattcagcttcaacgtcaagggaggccgctgtgaagcctgccacggcgacggcacgctgaagatcgaaatgaacttcctgccagacgtctacgtggaatgcgagacctgccacggcaaacgatacaaccgtgaaaccctcgaagtcacgtacaacggcaaaaccgtttccgatattctcgatatgcccatcgaagaggcagccaacttcttcaaggcctacaccggcatttcccgatatctgaagaccttggtggacgtcggcctcggatacatccggctcggccagcccgcgcccaccctgtccggcggtgaatcgcagcgcgtcaaactcgccaccgaactgcaacgccgttccgacggcaagaccgtgtacatcctcgacgagccgaccaccggtctgcacttcgaagatgtaaacaagctgctcaaagtgctgcaatccctagtggacaagggcaatacggttattgtcatcgaacataatctggacgtgatcaaggaggccgattggttgattgatcttggtccggaaggcggtgacggcggcggcaccatcgttacgcagggcactcctgagcaggttgccgaatgcgacgaatcctggaccggcaagttcctgaaaccgatgctatagcctttcaattacggctgaccttggggtgggctggggtgtgcgtcgctggacacgctccgggctgctcaggccaagtctttacggtccagcaacgcacaccccagcccacccaatcctgaatcaattatctgctgctacttgcgagaggaggattatgacgaacgatatcgagcggcatagtccggacgagtggcgcaagactgcggcggcgttgatgccggaaagctctagtgcaggagccgaagaaagcgcagctgcggcgaaggtgaatgcgaatggggcgcctttgctgggggattctcgtgatctgtttcggcctaagacttcggacattccggccaagcctggtgtgtataagtggcgcgatggggaagggcgcgtcatttatgtaggcaaggccaagaacctgcgcaataggcttaccaattatttccagccactgtatctgctgcatccgcgcacacagaccatggtgcttacggcacgcagtctggagtggacggttgttgccactgagttggaatcgttgacgcttgagtacacgtggatcaaggagttcgatccgcggttcaacgtgcagttccgcgacgacaagacctatccgtatctggcggtcagcacgggggagcgggttccccgcgtgtgggtcacgcggtcgcgcaaacgccgcgatactcgttacttcggcccatacgccaaggtgtgggagctgaggcacagcctcgatcggctgctgcgcacctttccggtacgtacctgcaccacgaatgtatttcataaagctcagctgaccggccggccctgcctgctggcctctatcggcaaatgctcggctccctgcgtgaatcagattgaagcggacgaacatcgacggctgtgcgaacaacttgttggcgtcatgaccggacgccttggacggccgtatatcgcgcagttgacccgcgacatgaaagaggccagcgccgagcttgaattcgagaaggcggcacgtctgcgcgatcagattcagatgttggagaccgtggtgcagcagaacgccgtcgtcttcgatcaggacgtggatgccgacgtgttcggctttgccagcgacgaattggaagcttccgtgcacgctttctatgtacgcgcgggttcgattcgtggcgaacgcaactggagcgtcgaacgggtcgaggacatcgctgatactgacttgatggcggatcttctggtgcaggtgtattcggatgaggcagggaatgaccacccccagtcggctgcgccgacagcccctgctagcgggggcgaaaatgcagccgtgctcccgctggcgggggctggcacgcgaagcgtgactgggggtggcgctgcaaccatttccaccagtcgcgaagccatcggctccacgcaaacccttacggccacggacgcaatcgcccgagcccaagccactcgcgagcgcaatactcgtcaggaaaccactgggcgcgcggatctgctggctcccattgcgccggtgccgcgcgaaatcatcgtgccgatcgaaccctcccggcgtgcggaactcgaaagctggctgaccgaccagcgcgggggaacggtgaccattcgcgtggcctcccgaggcgacaagaagcagctcatggatcgtgccaatgagaacgccagccaggcgttgcagcgcagcaagatgagccgcatctccgatatgggcgcacgcacccaggccatgaacgacgtggccaaggccctgggcctgaaccaggcgccgttgcgcatcgaatgctacgatatttcgaacaccgtgggtggcgccttccaggtggcttccatggtggtgttcgaggacgccatcgccaagaaatccgaataccgtcgtttttccattcgcggcaaggacgggcaaggagcagtggacgatctctccgcgctctacgagacgctgacgcgacgtttcaagcatggcaatatcgccggggattccggcgagagcatcgacgcggagcagcgcgcggccaaggctgagcaacagcaggaacaatccgtatccgatgcaaatggcaccagcagtacgacgccggcagcaattaccgatgcctcatcatttgccgattcgtctgaagtggtccagcagaacacgaatcgtcatcactttgcatacaagccgaatctcgtggtggtcgatggtggcaaaccacaggtcatggccgcggccaaggctctcgaggattgcggcgtggatgatgtggccgtctgtggcttggccaaacgcctcgaagaggtatgggtgccggatgatgactatccgatcatcctcaaacgccagtccgaaggcatgtacctgctgcagcgcgtacgtgacgaatcgcatcgattcgcgatcacctaccatcgccagcagcgccgcaaaggcgcgctgcgcagtgcgctcgatgagattccgggtattggagagagctatcagaaacggctgctcaatcatttcggttcggtcaaagccatgcgtgtggccagcgtcgaggacttcgagcaggtcaaaggtgttggccacgccaaggccgaggcgttgtatgccgcgttgcatgacgagtaggcagactcagctgattctcttcgggacctcccctcagtcacttcgtgacagctccccttctgtggggagccagtgcggcaacagcccatgacagtttcccatacacagtcgcgataatctccttcccggagccggtgccgccactcggcatgaattttcgattacggattgcgtagcgtgacaacaccacgacaagatgtcggctagcatggaagaagatattcaaggaggggatatggccaaccatcgctgcgcagtacttggcaaaccgattgcgcattctctgtctccggtactgcataacgcggcctaccggtcgctgaatctcaatgattggctgtatgacaagcacgaggcgggggaggatgaccttgatgctttcctcaaaggtcttgactccacttgggccggcctgagcctgaccatgccactgaaacgcaccatccagccgtacggcaccccggagaacctgtgggccaaggaactcagggtggccaacaccgcggtgttcgactggaatgacatcaccgatgatccggcctggcctcacggaaagccggccatcaaactgtacaacaccgatgtcatcggcatccaactcgccttcgaccatatcaaccgggagctcggcaaccatcatgcgggcgatcgcgccggcacagccctcatcatcggcaacggcaacaccgccacctcggcattggctgcgtgctgcatgatgccggagatcggccatatcaccgtcgccgcacggcatcccggtaagaacgccggattgaagcccgtggccgaaaaattcatcaacacgcataacccgtacgacgaaatcgaactgagcgacacgtcggccctgctcaacgccgcacgcaccgccacctatgtcatcaataccattcccggtttggcggcaaacggcatcgcgaatgtcatcaacacagacagcgcatcgcacgcggaaccgtattctggcctgttgctggacgtggtatacaatccacgtcccaccaaactcatgcaagcatggcgggcccacggtggccgcgccattggcggcgaggaaatgctgctgtatcaggcacttatccaagtgctgctgatgaccggcatatgggacgacgatccgcccagtgacgccgacaagcggttgcaaggcaccaccaccgaggacgatcatctggaaatcgcgatgcgcaacgcgctcgaggaggcattgtgatgagtcagccatcttccatccacgattcggaaaatcaggtcgacacccattccgattccgccgctgcggataatcagcccaatccggccgacgcattcgaggtattgctcatcaccggcatgtccggcgcaggccgttcccgtgccgccgattcggtggaggatatgggctggtacgtagtcgacaacctgccgcctaaattgctggttcctcttgtcgatatgatgacgacctccgggtcagacagcggcgttcacaagctcgccgcagtcattgacgtacgttcccgcagctactttgacgatctggcagccgtgctcggccacttggatgatctcggtgtcaaaacccgcatccttttccttgatgccagcaacgacatacttatcaaacgatacgaatccgtccgccgcccgcacccattgcagcacggcaaccgtcttatcgatggcattctcgaggaacgccatctactggaaaacctcaaagagcgggccgattgggtcatcgacaccagttccttgagcatccatcagctgtccaccaagctctacgagacaatgttgggatccgggcccaccaccgtggccgtgcacatcttcagcttcggattcaaatacggcatgcctatagatgccgatttcgtggccgatgtccggttcctgcccaatccattctgggtgcccagcctgcgcgagcttaccggagccgacaaacccgtcgccgactatgtgctgtccagcaaaggcgccaaggaattccttgattcctatgaacgcgccattgaaacggccatcgaaggatatgcccaggaggacaagcactttgtgaccattgccataggttgcactggaggccagcatcgatcggtcgcgatgagcgaagaactggctcgccgactacgcgcacacggcctgaacgtcaccgtttcggcgcgggaacaacaccatcgacgctcatcctgagtgaccacactgcgagaaaacaaagcccaaaatatatatcaaacgggttcggttgtccaccagattaggtatcacagaaagccgatggcttccgactgcttgatggccgaggcgcctaaggcattgagaagaacgggactgtaggaggttggatctttggctcttctggacgatgttaaaagcgagttggctgcctttgaaggtgactcgcctgccgcgatcaaggcccaagcagcggccatgattcgttttggcggtggtttgcgtcctgtgcaaaacgcgtatgtgattcaagccgtatttacctcattggatgcagccgagtggcttcaaaacaccctgaagaacgtattcggtcatgaggcagaggtcaatcacctgacccgccagactccgaatggtccggtggaaacctatgtggtgcttgtcacccgcaacgtggtggcccttgcgctgcagaccggtctggtcgaccgccgcaagcagcaggtgcgcggacttcccgccgaagtggtcaacggctccatcgcccagatcaaggccgcatggcgtggcgctttcatggcccgtggcttcctgtccgaccccggtaaagcaagcttcctggaaatcgcctgccccaccgaagaggccgccatggccctgtgcggcgtggcccgtcgtctcggcattcaggccaagcatcgcaccctgcgcagttccgaacgcgtgacgctcaaagatcccgacgccatcgagcgcatgctcaagctcatgggtgccacccgttccgcccgcgaatggaccggcaagcgttccgacggcgaagcccgcggcaaggccaatcgtctggccaacttcgatgatgccaatatgcgcaggtccgccaaagccgccgccgaggccagcgagaaggtgcagcatgccttcgaggtgctgggcgacaacattccggacaatcttcgtcaagccggccagctgcgcatcgaccacgtggacaagagcctcgaggagctcggcaagattgccgaaccacagatcaccaaggatgcaatcgcaggccgtatccgtcgactgctccagctcgccgagaaaaccgaaaaggcccgggctgccgaaggacggtaagaggcaaaccgtcaagatcgtccagcatatgcaacgacttacgaaacaccgcattcagtcatcagacgaatgcggtgttttgttctggaatgcctgtaatatgcaaagtggcaaaaattggccactttgacgtgaaattcgtcaaggaaaggatattcatgaagacactcaaggaccttggagatctcaagggcaagcgcgttctggttcgcgctgatttcaatgttccgctggacggcaccaccatcaccgatgacggtcgaatcaaggccgctctgccgaccatcaagaccctgcgcgaagaaggcgccaaggtcatcctcatggcccacctcggccgcccgaagggcaaggtcgtccctgagctgagcctggccccggttgccgcccgcctcggcgagctgctgggcaccaacgtgccgctggccaaggacacctacggtgaggacgcccaggccaaggtcgccgccatgaacgatggcgacgttgtgctgctcgagaacgttcgcttcaacccggaggaaacctccaaggacgccgccgaacgcgccgcctatgccaagaagatcgccgccctcggcgaggccttcatttccgatggcttcggcgtggtccaccgtgctcagggctccaactacgacgttgccgccgatctgccggccgccgcaggcctgctggtcgagaaggaggtcaaggccctgtccaaggccaccgagaacccggagcgtccgttcaccgtggtgctcggaggttccaaggtctccgacaagctcggcgtcatcgagaacctgctcgacaaggccaaccgtctggtcatcggcggcggcatggtgttcaccttcctcaaggccaagggctacgaggtcggcacctccctgcttgaagaggaccagcttgagaaggtcaagggctacatcgagaccgccgagaagaacggcgttgagctcgtgctgccgaccgacgtcgtcgtgaacgccggcttcccggccggtgacaccccggttgccccggaggtcgttgccgccgacgccattccgtccgacaagatgggtctggacatcggcccggattcccagaagctcttccacgacaagatcgtcgactccaagaccgtcgtatggaacggcccgatgggcgtgttcgaggttcctgagttcgctgccggcaccaaggccgtggcccagggtctggtcgacgccaccgcagccggtgcgttcaccatcgtcggtggcggtgactccgcttccgccgtgcgcaacctcggcttcccggaggatggcttctcccacatctccaccggtggtggcgcttccctcgagttcctcgagggcaaggagctcccgggtctgaaggtgctcgagtaagttttattctggctcccctcctcgaggggagctggctcgcgtagcgagactgaggggagttacggcgatgtcgggctcccctcagtcagctttgctgacggctcccctcgctgaggggagccaaggaacgataatgagaggggaaatcatggcgtccaagcgcattcctttggtagccggcaactggaagatgaacttcgatcatctggaagccacgtactttgtacagaagctggtatggctactgcgcgacgctcatttcgacttcaagcgctgcgaggtcgcccttttcccgtccttcacctcgctgcgcagcgtgcaggtgcttgtcgaagccgacaagctccgcctcacctatggtgcccagtcggtatccgtgaccacgcaaggcgcctttaccggtgacgtatccgccgatatgctggcccaccttggctgttcgtatgtcattgtcggacattccgagcgccgtaaataccatcctgaagacgatgccaatatcgtcgatcaggtgcgtgccgtacttgccgccggcatgcagccaatactgtgcgtaggcgaaagctacgaggaacgccgtaagggcattgagctcgacttcgcagtcggccaggtgcgcgatgtcacccgtgatctttccgatgaggaagctgccaaactcatcgtggcctacgaaccggtctgggccatcggcaccggcatggtcgccaccccgcaatccgctcaggacgcagccaacgcgattcgcgatgatttgaagaccacgttcggtcaaaaggcgtcggacagcgtacgcattctgtacggcggctccgtcacctcaaagaacgcggcagaactcatctcccagcctgatgtggacgggttcctcatcggcggcgctgccttggatgtcgaggaattgtccaaaatcgcccgtcttgcgctgaaaacaacatcttcacggtcgtaatacactggttttccgatatgtgcgctatgcttatcaacagtaaattcaactcggaggtaccctgtgaccgctcttaagatcacgctgcaagtcatcgtcgtgctgctcagcttcgtgctgaccctgctcatccttatgcacaagggcaagggcggcggtctgtccgacatgttcggtggcggtctgacccagaatgccggcacctctggcgtcgccgaaaagaacctgaaccgctggaccgtcatcatcgccctcgtatgggtggctctgattatcggcctcgacatgatgaccaagttcaacctcggctgattgattttgtaaacttttcacgacccatgaccgatataccggtcatgggtcgtagtttttccatcgttcatggcttgcaaaggagtgcactatggtcactatgaaccgtaacaaagtcgtcattgtgggcaccggacaggtcggtgcggccgcggccttcagcatcgttacacatggtctgtgcaatgagctcgtgctcatcgatcattttgccgccaaagctttgggggaggcccgcgatctcgatgacggcagcgagttccaggatcgtcacgtcaaggtgcgtgccggcgactatgccgattgcaaggacgcggatatcgtcgtcatcaccgtgggacgtaagccgccggccaattccaaccgtatggccgagctcggcttcaccgtcggactcgtgggcgaagtggtcgacaatgtcatggcctcgggctttgacggcgtaatcgtcatggtttccaacccggtcgacgtaatggcctggtacgcatggaaacgttccggcctgccgcgcacccaggtgcttggcaccggtaccgcgctcgatacctcacgcctcaagaccatcatcggcgaggaaaccggccttgatccgcgcaatgtgggcggcttcgtgatgggcgagcatggcgactcccaattcaccgcatggtccaccgtctcgctcggcggcaagccgttcgctcgcttcctggctgacaaccaagaccgcttcgcctccgtatccaccgccgaagtcgaggaaaagacccgtacccgcggcgacgaaatcgtggcggccaagggcggcaccaacttcggcattgcttccaccgtggccggcatagtgcagaccattctgtgggatgagcgtcgcatcgtccccgtctctacgctgctggacggcgaatacggcgagcatgacgtgttccttggcgtgcccaccgaactgcgtgccaatggtgccaatgaaatcgtggaactggaactaagcaacgaggaaatggccaaaatgcatcactccgccgaactcgtccgagaccattgcaagggactgctgtgaccacaaccatcaagatgacaactcgccccgaactgctggtcgccgacctcgacggcactctattgcatgacgccgaggtctttgaggatcgtttcatcacccagcgcagcatcgacaccatcgctcgggctcacgacgccggcatgaaattcgccatcgccaccgcgcgaccggtgagtaccggactgcagtttgccgagaaactgcccgttgatgctgtgatctatctcaacggtgccctcatcgatttcgacccggccaattccgatttcgatatgctgacatccgactcatcacagcagagcgagaatcatctcattaaaatcggtttctcctcacagcgcgcctgcgaagtctgcctgtttctgctcgaccgtatgccaaacctcaaaatcggcatcgtgatgaacgacgtgcgctacaccaacttcgatgtgcgcgtgtattggaagactcaggctttccaatacacgaacttccatgacgttcctgatggaatcgcagacaaaatcaccatcttccctgaaccggaacaatggaatgaactgcgtgcgctgattccgccggacttcgacatctccatcagcgaaggcgtgatgtggatgctcatgaatcctcaggccaacaaggagcatgcgctgcgcttgctgtgcgatcgtctcgatgtcccgcttgagcagactgcggccttcggcgacgatctcatcgacatcaatatgatgagcgaatctggcagaggagtggccgtggccaacgcgaatccaaaagtgctgtccatcgccgacgagatttgccctcctaacaacgaggatggcgtcgctcagtggatcgagtcacagcttcgataattgctgtgccgttcgaacactgtaaacacgccaaaaattgaacacatattgaactaggcgtatgctttgaaccgttgttcaacaagacaattgaacttccggttggaggcatgggactatgagcgtatcggtgtttgcggaacgactgcgcaatgcgatgaacagtagggaattgaagcaggttgatctggtgcacgccgccgaacgccgcggtgtcaagatgggcaaaagccacatcagccaatatgttgcgggcaagaccatgccgcgagaggatgtgctgctgtttctggctgacgaacttgatgtcgatgcgaactggcttcgtggccaatcctcggaaacaaaattgaactccgacgcacaacccgcttcccatattgacacaccgagcggagctcccacgtcggcggaaacggaaattcctgctgctcgccgccgtacctttggcaaatcacacaagcttgatgacgtgctctacgatgttcgcggcccagtggttgatgaggcggcccgcatggaacaggccggcacccacgtactgaagctcaacatcggcaaccctgcaccgttcggcttccgtacgccggacgaggtcgtctacgacatggcgcaacaattgcctgaaaccgaaggctattcggcttccaagggcctgttctccgcgcgtaaggccatcatgcagtatgcacagctcaagaacattccgaacgtcaccatcgaagacatctacaccggcaatggtgtcagcgagctcatcaacctgtctatgtccgcgctgctcgacagtggcgatgaggtgcttgtgccatctccggattacccgctgtggaccgcctgtgtgaatctcgccggcggcaccgccgtgcattacctgtgcgacgagaagtccgactggtacccggatatcgacgatatgcgtaagaagatcaccgatcgtaccgtggccatagtgctcatcaatccgaacaatccgaccggtgcgctgtatccaaaggaagtgctgcagcagattgtcgacttggcgcgtgagcaccagctcatgattttctccgacgaaatctacgatcgtctggttatggacgggctcgagcatatttccatcgcttccatggctccggatctgttctgcgtgaccttctccggcctgtccaagtcgcatatgatcgccggctaccgcgtgggctggatgattttgtcgggcaacaaggccatcgccaaggattacatcgagggcatcaatatgctcaccaacatgcgcatctgttcgaacgtgcccgcgcagtccattgtgcagaccgcgctgggcggccatcagagcgtgcacgactatatcgtgcccggtggccgtatccatgaccaacgtgattacatctatgacgcgttgaactccattccgggcatcaccgcggtcaagccgaaggccgcgttctatatcttcccgaagattgatatcaagaagttcaacgtacatgacgacgagcagttcgccctcgatctgctgcatgacaagcgcattctcatcacgcgcggcggcggcttcaactggcacgagccggatcacttccgtatcgtctacctgccacgcatcgaagtgctcaaggatgccaccaacaagctctccgacttcctcagctactactggcagagctgattttctcaatgccgacgagtccactaatgcgcactcgtcggcatatctttatatgaatatcgatgtcgacgaactgtacggcaccgtaaccatcgacgcaccccgtctttctgcaaatctacatcccattgtcgatgccatcgactgagcgtgggggcgtaacgccgaaactaataaaaatatgagcccgagtgggaccgtctccacatgaggtctttatcgcaccaaaatacctgcaatgacaatgaggccggccttgattcgtatggtttgcaggtataaagggtcgatctggagtacctgaacagcgctattcgggctcaactccatagattgcaggtataaaggtgcaagttagagccgattgtgcgccgtaacttgcacctttatacccgcaacgccgctaacaagtaccggaatacctgcaactgaatcgggtcatgccaaggtgaaggcgatgatgaacgcagtggcggacagtacagctgttaacagcaggtagaatatcgcggccttattctgaaaaccagctgaattagccgaatcatgactgttgctcatgctgcctgtggtagccataacggttgcgatggccgagacgagggaaaatattggcagcacgtacagcaaaacggctagtacgatgagaggtcctgaaccggtgcaaaaagcaataagtcctgctttgttcgttgctgccagcgcggggcaaaaatcggtatggccgccagtgccgtaactgtaggtcagaaaagtgattactgcccaaaacaggccaagaggaaccgatacatgacttacggcagacgcattgatactgataacccgaaacagcttatgcacagatacaggtcgtatatcgcgaatcgtcggcagtgctgaaccaacgttatctcgtggaatatcgatagagatgagatgcgccagcgcatatgccgcaagtccaagtccacaagcgatggtcacaccgccggtggaattgacctcatcggacaccgagtattcggtgacgagcaccggcatcacgccaatttgccacacgagcagcagccgcgtcaccagagaccaaccaccgcgctcggaggcagacttatccgaacccgtcagattagtcagatcggctatatgctgctgctggatactagtgctgttgcgcgaataggcggcaagtatggcgtaaaccaaccacgttgccgcatgtatcgcccacaacattacaattttggtattcgcgctcagcaccaatatgaacgcaacagccactgccgcaagaaaaacacagatgcccgtgcgaagacgatgacgagcaaagccctgtactcctgcaacagtcagacaaatgattgcaacgacactcagcgcagtcaccgccagaaaccacagtggcgaagtgacgcaggctccgtaatcaccagttgcctggccagacagataataagtcattctgccaatcgtcggacagttcggatgcagcatcatgccgccccagattcgctcatatagtggcgcgaacgatacgccagcaccgctgagcgccgcaataatcgccatcaccatggccggaatcaatccaagctcgcgattccggtcggtttccgttatctgcctatcactggtgttcatgacgcaccccgccttatgccgttatcgatgatgccagtatgactataatagatgagcgaaggccagcagtatacaggaattctgtatgccgctttataggcgtgatgctgtgacagctaacatgacaaccactatcactggccgaccgtcaaactccgtgcacaccgggcaactaccgccggggagcatcggcgatgccgatggcgagaccaatgatggccggcataacccagccgagttggtattgctgcagggggagcatggccagtgccgcgtccagccaactgatggaaccgccgaagacggcggccaggctggagatgcaagtggcgaaggaggcgatgcccaccagcagtacagtccagaagtagacacgcgggaatcgcgcgccaagcttcttatgggtaagcgccagcaacaccagcacaatggcaatcggatacaacgcggacaacaccggcacggagactttgatgatcgcgctcagcccggcgttggacacgatgaagctgaacacggtgaagatgatctgccaagtgcggtagctcagcgttcgtccggcgacgatctggaatcgagtatggaagtaggtggcgcaggtgcagatcaatccggtgcatacgttgaggcatgcgatgacgaacacgacgccaaggaacgcggtgccgaacgtgccgaacagggaagaggtgaggttggtgagtacggtggcacctgtgtccttggccgggtcgatagaagcgatggcgccagacaccacgcccacataactcagggcgccgtaaatcacgataagcagcacgccggtgccgagcccggcatacgcggtttccttctgcacttgcgattcatcatcgacttgctgggcgcggatattcgcggaaatcacgatgccgaaataaagcgcggcaagcagatccatggtctggtagccgtcgaggaagccgcgtgcgatttggtttgtggagtaatcgcccatcggtttggccggggtgccgatgccgtgaaccaggcatgcgatgaacagaaccgcgataagcaccagcagtaagggtcccatgaatcggccgagcactttggagagtttctcaggatgttgggcgaacaagaaggcaagcgagaagaacacgagcgagtagataagctgggctagccagtcataggaagtcggcacgaaaggtgccaccatcatttcgaatgaggtggtggccgtacgcggaatcgcaaaacaggggccgatggtgagcatgatcgccacgccgaggaacagggcaaatttgggggagacccggccggcgagcttgtcgaagcctccggcgaaagtgaccgccagtacgccgagaatcggcaggccgaccgcggagacgatgaagccaatggccgccggcatggttgcggaaccagcttgcgcgccgacgaatggtgggaagattagattgcccgcgccgaagaacatcgaaaagaacgtgaaggtcatgaccaaccgttggcgtgcgacaagtttgttcaaggttctcctctttctctgtgtgccagctacccactctagcaagttcgcctctagtgtggtcccttcgcaccatccatatgccgtcatccactccctagcatacgtttttccagattattttctccatcatctggaaaacgtacactgaccgacagtaagcgtacgtttttccagagaaggcctgaaatagtctggaaaaacgtacgctcagggtgagtaagatccgaatatgtcgtaacaaaagaaggacgaagccctatccaatacgcaaaaagccccgatcggttggggtcggggcttctgtgagctaatcagttaatgcgctaggcgcatcgactaataatctcaggcgttcacgcggtcgatgccggactggacgtcagccagcacggaatcccaggacttgatgaaggcggcgacaccgtcggcctccagcttgtcggtgacgtccttgaggttgatgcccagctcagccagcttgttgatgacggcgtgggactcctcgtaggtgccctcgatggacggagcgccgttgccgtggtcggccagagcgttcagggtcttctccggcatggtgttgacgatgtgcttagcaacgagctcgtcaacgtacttgcagtcggagtaggcagcgttcttggtgccggtggaagcccacagcgggcgctgaaccttggcgcccttggcagccagatcggcccaacgcggatcctcagcgaacttcttctcgaagagctcgtaagccaggcgagcgttggccacagcagccttgccctccagagccttggcttcgtcggagccgttggcttccagcagcttgtcgacagcggtgtccacgcgggacacgaagaaggaagcgacggagccgatgtgcttcaggtcgtggccgttggcgtcagcctgggcgatgccctcgatgaaggcgtcgatgacctgctcgtaacgctcgagcgagaagatcagggtgacgttgacggagatgcccttggccagggtggcggtgatggccggcaggccttcgagggttgccgggatcttgatcatggcgttcgggcggttgaccttctcccagagttccacagcctgcttggcggtgttctcggtgtcatgggccagacgcgggtcgacctcgatggagacacggccgtcgacgaagtcggtagcctcagcgatctcgcggaagatgtcggtggcgttgcgcacgtcggtggtggtgagctcgcggacagcggtctcaacgtcaaccttgccgagctccttgagctgagcgtcgtacggaccgacctggctcagggccttctggaagatggacgggttggtggtaacgccgaccacgttcttgttggcgatgaggtcctgcagggagccggactcgatgcgggagcgggacaggtcgtccagccagatggaaacgccgttgtcggacgtacgctgagttgcttcagtcatttatttctccttatattccgttatggaacaaatcttgttaagccctccctcttagtgagggagggcagtgaaatcacttggcggcttcgacttcggcgatggaggccttggcggcttccaccacgtgctcggcggtgatgccgaggtcgatgaggttctgagcaccgtcgccctgcagaccaaactgctcgatggagacaggcttgccgtaggaaccgaggtacttgtaccacggcatggcaacgccggcctcgacggagacgcgagccttgacaccggctggaagcacggcctccttgtactcggcgtcctgctcctcgaaccattcgagggacggcacggagaccacgcgggccttgacgccttcctcggcgagggtcttggcggccttgacggccagctggacttcagaaccggtggccatcaggatgacatccggagtgccttcggtgtcgaccaggacgtaagcgcccttgcggacaccgtccttggccttgacagcggtctcggcgagaaccgggacgccctgacgggacagcaccatggcagccggcagcgtgttcttcttctcgaagaagtagcggtaggcttcggcggtctcgaaggcatcggccgggcgaacgacctcaagctgcgggatagcgcggaaggaagcaaggtgctcaaccggctggtgggtcgggccatcctcgccgacggcgacggagtcgtgcgtccacacgtacaggttcggaatctccatgagggcggccagacgaacggcggaacgctcgtagtcggagaacatgaagaaggtgccgccgaacggacgggtgtgggagcccagcaggatgccgttggtaatgcagcccatggtgaactcgcgcacgccgaagtgcagctgacgaccgaactcgttgcagaccggccactgcttggtggcgcactcagccggagcgaaggtggcagcgcccttgaggtcggtcttgttggagccaccgaggtcggcggagccgccccagagttccggcatgacagcagcgatggcattgagcacagagccggaggcgccacgggtggcgacaccctttccgacctcgaaggtggcctcaaggtcatcgatggccttgtcgaagccttccggcagctcgccggccttgatgcggtcgtacagggcagccttgtccgggttggccttgcgccatgcgtcgaacttctcgtcccattccttgtgggcctcgagaccgcgctcagcaaccttgcgggcgtgagccagagcctcttcgtcaacgtggaagttctctgccggatcatagccgaggacttccttgaggccggcaacggcctcggcgcccagcttggagccgtgagaggacggatcgttggtcttgcccggggtcggccaagcaatcagggtgtcgaccttgatgagcttcggctgatccggagcagcggcctcggccttggcgataacgtcggccagaccctcgacgtcctccttgtaggagccgtcgggctggatgaagctgaactcgtcggtgtaccagccgtaggcctggaaacgcttgagcacatcctcggccagcaccaggttggtgtcgccttcgatctggatgcggttggcgtcgaagatcacggtgatgttgccgagcttctggttggcggcaagggcagcggcttcgccggagatgccctcttcgatatcgccttcaccgcagatagcccagatcttgtggtagaacggggagtcttccttcggggtttccggatcgagcagaccgcgctggaaacgctcgccgtaggcaaagccgatggcggaagcgaagccctggcccagcgggccggtggtcatttcgataccgggggtcaggccgtactcggggtgacccggagtacgggtgtcagcgccaccacggaagtgcttgaggtcgtccagggtcagaccataaccggagaagtacagctggacgtactgggtgagggaggcgtggccaccggaaaggatgaagcgatcacggccctcccagttgggatcgttcggatcgtgcttgatgaaatgctggtacagcgtgtaggcgatgggcgccagggaaacgggggaaccggggtggccggaaccggcgttctccaccgcgtcagccgaaagggccttcgccatcttgatggcgcgctcgtcgagctcggtctccttgaattcggtcatggattactttccttccaattggtcgggccgcgtatccggcttgtgccgggcgcttgacgccctcacattgcgcttaccatgctagcgatggtttgcgacgttatggtgcaattttggcgtgttttggtagtttgtgttctgttagcgttcacaattcacatcacttcgccgcaaacgaacgcattagcactcgaaaccaatgagtgctaatacaatgagagcagattgcatactgtagatgtatatataaggaggcgcgcatgacgcaatcacgtcgcatgctggtactgcgcgctgtggtggaagattacattcgttcgcaagagcccgtaggctccgcggcattgtccaaggaacgcgatttaggcgtcagctctgccaccattcgcaatgatatggccgcattggaagatgaaggctacctgattcagccgcatacgtccgccggtcgcgtacccaccgaaaagggatatcgttattttgtagatcgactggctacggttgtgccgctcagcgaagctcaacgccgcggtatcaatagtttcctatccggctcggtcagcctcaaggacgcactgcaacgttccgcacgactgctctcggaaatcaccggtcaagttgccatagtcgcatcgccttcattatccaaggcgacgttacgccacgtggagctggtaccagtggccatgagcacgctacttgccgtggtaatcaccgataccggtcgcgtggcacagcacggactgatcgtctcggccatgcccacggccgacgacatcaaccgcctgtccagtgcagtcaatgaacaatgcaacggtcagtccttatcatccgcatccgaaaccgtgcgcgcccttggttgcggcaccggattcgagacagtgcgggaggcggccgacgccctggccgacgccttcgcatcgatggcattggacgagcgcgccaacgaattgtatatgtccggcacatcgcatctggcgcattcccgttctctgaccgatctggcaccgctcttcgacgcgctggaagagcaggtggtgctcatgaaactgatgagcaacctcagcgaagagccaagcgccactggcgtaggcgtatccattggctccgaaagccacacacctgaactcttgcatgcctcagtggtcagtagcggttacggacgcagtacttcgcccgtagcgaacgattcggaacgcaacgagacatcgcccgatcaggacggcaccaacgaacccattgcttttgtgggatccatcggcccaacccatatggattatgcggctaccatggccgcggtcagggcagtggcaaggtatctcactttttttgtctcggaaagcggctccggcgactgaccgcaggctatggcacaatgacccgcagaccaacgaatacaaaggaacaaacaagtgacagattattacgagacgctgggcatcgaccgcaacgcgagcgacgacgagatcaagaaggcgtaccgcaagctcagccgtaagtatcaccctgatatcgcgggaccggagttcgaggacaagttcaaggaagtgaacaacgcctacgatgtgctgtccaatccggataagcgccgtatgtatgattccggcgttgaccccaacgatccgaacgccggtgctggcggcttctccggcgcgggattcggcgatatgggagacgtattctccacgttctttggttccgcattcggtggcggctcacagggcccggtgccgcgcacacagcctggacgcgatgcgctggcttccgcttccatcgacttgaaaaccgccgtattcggcggcacggcgcacgtcaagatcaatacgttctccctgtgtcaggagtgcggtggctccggcgcacaaggcggcgcccagccggtcacttgcccggactgccatggacagggcttcatgcaaaaggtcgtgcgcactatgctcggccagatgatgacctccgctccctgcgagcgctgcgagggtcacggcaccatcatccagaatccatgcccgagctgcatgggtcacggccgcgttcgcaccacgcgtaatgtgggtgtcactgtgccggccggtatcaacgacaatgctcgactgcgcttggccaaccagggtgaagtcggtgagggcggcggcgctgccggcgatttgtacattgatattcgcatcaaggcagataagcagttcacccgcgacggcgatgacctgcattgctggattcaggttccgatgagctgggccgtgctcggacacgatctgtccattgatacgtttgacggcgagcagaccgtatccattccggcgggctgccagcctgaggacacggtgacgttgaagggtctgggcgttaccaatattcgcaataaggatgagcgcggcaatctggttgcccatgtgaacgtactgattcccaccaagctcagcgagtccgagcggggactgattgaacagttcgccgcctcgcatgattccgatgccacgcacgtctcccaggcttcccgtccgcaaaccggtcagaagaagggattctttagcaagttaaaggatgccttgagctgattcgttcttggcgcctctctccgaggtgggggggaactggccgtgaagctgactgagggggagctcgggtacatccgcaagctccccctcagttgtctagcgacgacagctcccttcagagagggatgccatgtgccgctaactatttcagcagtgagcggcacatggagcgatattcgctaacgtagccgccgccgaagaacacacaatggccggcaatggggtagagctgccagagcgtgatgcgatcctgccatccagccttcagcggatgcaccgactgatagccctcggtaatctgcgtcaaataactcataccgaacaggtgcagcatggccagatcctcttcacggtgaccaccatgtgccgccgggtcgatgagcacggcctcggtctgtccggaatcagcagtccacatcacattgccactccacaaatcaccgtggatgcgggctggcttgtcttcggcggcacggcccatgatgtcaggcaatgcctcgattaccttttccgtcagatcgacatcacgctggtcaagttcaccgcgcttgacgccaagctcgaccatcgggcgcagacggccatcagcaaagtagctgatgggatcggcccattcgccggtatccatctttaccggatcctgcaacggcccgaagtagcatgtgccgtcatatccttccggcgcagaaccgaaatattcggcaccggcatcatgcatgcgtgcgagcgccgcgccgaattccaatgcggccttggccgtgggggaggagctgttcactcgctcgatgtcgagatagtctttgccccagtcatagacctgcaccacacgcgggccaccctgcgcatgcgcggcacccaaccattgcagtccgcgtccttcgcattcgaagaatccctgaggagcaaaagccctgcttttacgatatgtactcatagccgttccctccagcatggttgtgacgttttgcactcgtattcattgtagaagccgtgcatgttaccaattcctagtgctgttctacaccccaaccggtagggtgttcaacgtcataacacattacgtatagagaaatctcgaggaattatgaacctcttccaagcgattgttctcggcattgttcaggcacttaccgagtatctgccggtatcgtccagcgcgcatatccgcatcgtcggtgatttgatgttgggctccgaccccggcgctgctttcactgccatcatccagattggtactgagctggcggttattctgtatttccgccatgacatcgccaatattcttactcactggttcgcatgcctgttcggcaagaacggcaaggactggaaggcccgcatgggccgtggcgacaactatgccacgctcggctggaatatcatcgtcggctcgattccgattgtgattcttggcttcactctgcagaacgtcatcgagaccacgctgcgtaacctgtggatcaccgcgaccgtgctgctgctgttcggcattctgctgtgggttgtggatgcccgcgccaagcagaccaagaccatggacgatatgacgtatcgtgatgcgttcctctttggtctaggtcagtccatggccctgattcctggcgtttcccgttcgggcggcaccatcaccgtgggccgtgcgcttggctatgagcgtgaggccgctgtgcgtttgagcttcctgatggccattcccgccgtattcggttccggtctgcttgaggccgtcaaggctgtcaaggactacaagaccgatgcgatgttccccggctggggtcccacactgatcgccatggtcatcagctttattctgggctacatcgtgatcatcggattcctgaagttcgtttcctcgttctcctacaaggcgttcgccatctaccgcatcgccttggcagtggtggttgccctcctgctgatcgccggtgtgttgccggccatcgacccgtcagtggccgcagcggcttaaagaaacactgcatcgtcaataatgctcccgctggcaggagctggctcgctttgcgagtctgaaggtggttctgtctggaatacccagtgaccacccctcagtcagctatgccgacagctctcgccggcgggagcattattgtatgctcaggtcagctacccatttggcgtaggaacgcctcggcctctttgacgagctgttccgcttggggcgcgcccagcgaggcctcggcgtcggccttctgcttcaggtcataatcatgctcaagatgggccacataatcctgcagctgctcgttgcaacgcactagtaccgatgcctgtgatttccattgttcagccttgcgttccaactcgctgacatcaaaagagaaaccgatgcgatgccccaaagcatcaagcaggcgcatggtgcccgtcgcgcattcgtcgctgccgagatattgggggatggaaacccacatggaggcatggaacatgccacgttccgcagcgaaaatatccagcacggtggggatgcccacaggaccgttgtattcccggtctccctcacactggcaattgccgtcgctcacggaaatgggcagaggcctggtatgggggcaatcagagaacatcgagccgagagtaatcacaccatccacatcgagttcttcagcgatggcgagactctggctgcagtattccttccagcggtagttaggctcaggcgcgatttgggcaaatattcgacgcccctcatcaagcacaatctcgtagaacgtagtctgcggccaaataagattagtacgaccggatacatggcacagcatgggacgagacacctgatagtcatagaaggcgtcgcagtctatatggcgaatctcacgggattcgtaatgcttgaccagataacggacgacgttcgaagccgcctggcaagcatcattccatccctcgaaagcggcgatcatcaccgaacttggggtattcgcatcttcactcatacctctagagtaacgtggacttgatgtcatatatgtttgcttcagccataagcgaggagtcaagaacggcacaccagaaacgacacgccgcagctggacgaactacacgcttgtgagtatagtaaacactcgtgctttgagcgggggaaagcctcgtgaggcacatgcggacatagcttagttggtaaagcgcaaccttgccaaggttgagaccgcgggttcgagtcccgttgtccgctctaggtccgatgagttgacagaccttacggtgggttagccaagcggttaggcagcggcctgcaaagccgtatagacgagttcgactctcgtacccacctctcaggcagacgaagaaattcgcttgcaggagcatgacccgggcggttggcgcagtggtagcgcacttccctgacacggaaggggtcacaagttcgaatcttgtatcgcccacgcagaccgaagcaattcggctcgcataactgaataccgattgatttcgggcgattggcgcagcggctagcgcacttcgttcacaccgaaggggtcgtaggttcgattcctacatcgcccactggaatccgcttctcacggcggaatcctttgcggacatagcttagttggtaaagcgcaaccttgccaaggttgagaccgcgggttcgagtcccgttgtccgctccatcaaaacctcgctccggcgaggttttttcgtatttgttcaggctttgccaaatgtcgtacacccaacctatcgtggcctacgttgattacccagtccaggcctgcacattagtaccgcggaccccgatagcaaaggacaaatcatggcgcaagctaccatctccatcacagtcaacggcgaagcaaaggaggtggaagcaaccactaccggcgtcgaattgttcgcagaagacaagaacatcgttgcggtcaagctcaacggcgaaaaccgtgacctgtacacgccgcttgccgacggcgacaccgtagagcccatcacgctcgattccgaagacggcctcgcgatcatgcgtcactcggccacccacgtcatggcccaggccgtgcaggaggtctatccgaacgccaagctcggcgtcggcccggtgatcaaggacggcttctactacgatttccaggttgacaagcccttcaccccggaagacctcaaggacatcgagaagcgcatgcagcgcatcatcaagtcctcccagtccttccgccgccgttccgtgaccgaggaagaggccctgaaggaagaggccgaccagcccttcaagatcgagctgatcgaagacaaggaagcacacctcgacccggccgccgccaccgagatttccgagaaggaactcagcttctacgacaacgtcgaccgtgacggcaatgtggtctggaaggacctgtgccgcggcccgcacctaccgaacacccgctacatcaaggctttcaagattgagcgttcagccgctgcctactggcgtggcagcgagaagaacccgaccatgcagcgcgtctacggcaccgcttgggccaacaaggaagatctcaaggcataccagacccgtctggaggaagccgccaagcgagaccaccgcaagctcggcgccgagatggacctgttctccttcccggacgagatcggccccggtctggctgtgttccatccgaagggcgctgccgtgatcaacgcgatggaggactactcccgcgaaatgcaccgcaagcaccactacagcttcgtgcagaccccgcatatcaccaagggtggtctgtacgagacttccggtcacctgcactggtacaaggatggcatgtacccgccgatgcacctcgatgaggagtacgacgcggacggcaacgtgaccaagcccggcttcgactactacctcaagccgatgaactgcccgatgcacaacctgatcttcaagtcgcgccagcgctcctaccgtgagctgccgctgcgcctcttcgagttcggtaccgtgtaccgctacgagaagtccggcgaggtccatggcctgacccgtgtgcgtggcttgactcaggacgattcccacatctactgcacccgcgagcagatgaaggacgagctgaccagcctgctgaccttcgtgctgaacctgctcaaggacttcggtctgtccgacttctacttggagctctccaccaaggatccggataagtacgtcggctccgacgagatctgggaggaggccacccgtaccctgcgtgaggtcgccgaggcatcccacctcgacctcgtggccgatccgggcggggccgccttctacggcccgaagatctccgtgcaggcccgtgacgccatcggccgtacttggcaggtctcgaccatccagctcgacttcaacctgcccgagcgtttccagcttgagtacatcgcgaaggacggcacccatcagcgtccggtgatgattcaccgcgccctgttcggctccatcgaacgcttcttcgccgtgctgctcgagcactacgctggcgccttcccggcgtggctggcccccgtgcaggtgctcggcgtaccggttgccgacgagttcgccccgcatctggccggtttcgtcaagtccctcgaggatgagatggtccgttgcgagatcgactactccgatgaccgcttcggcaagaagattcgcaacgcctccaagtccaaagtgccgttcatcctcatcgtcggtgaggaagacatgaacaacaacgcggtgagcttccgcttccgcgacggcagccagctcaacggcgtaccggtggacaaggctcgcgagcagatcctcgccgtgatcgccaagcgcgtccaggtgaactccgccgacgacttcaacgccgctgtagctgagtaaaggaatacatgatggctgacgtgcgtgtcgatgatccggcggacttcccacctcaggaagacacggtcgaacgactgtggaccccgcagcgcatgacctatgtgctgcgcaacagcgaggatcgtccgaccaaacccaagtcgaaggaatgtccgttctgcgccggaccgaagaagtccgacgaagacggcctcatcgcctggcgcggcacgcacgtgttcgccatcatgaacctctacccgtataacgtcgggcatctcatgatttgcccgtaccgtcacgtcggattcatcaccgaacttgacgacgccgaattgttcgagttcgagaaggccaccaccctcgccatgaaggtgatggagaccgtctcccatccggacggatacaatatcggcatcaatcagggcgaggtagcgggcgcaggggtcgcggcccatctgcatcagcatgtggtgccgcgctggaacggtgacgcgaacttcatgcccatcgtcgcccaaacgcgcaccatgccgattctgctgtccgatcagcgggatgcgtatgccaaagcgtttgcacagctggcttccgactaccatctgccgctcgtctgataccggcacgataccctcatgcatctggtcgaaccagcgcatgattcaaaaagacaatcgaaaacatcacgggtatgtctgattaacggcctacaatcgtttcgtttgacatcatccgtttattactgctaggagcattatgtcaggtcattccaagtgggcgaccaccaagcacaagaaggccgccatcgacgccaagcgcggcaagctcttcgccaagctcatcaagaacatcgaaatcgccgcccgcctcggcggtggcgacccagacggcaacccgtccctgtacgacgccatctacaaggccaagaaggcctccatgccggccgacaacatcgcccgcgccgtcaagcgtggtgccggtgacgaagacggtgccgccaactacgaggacatcgtctacgagggctacgctcccgctggcgtaggcctcatcatcgagtgcctgaccgacaaccgcaaccgtgcggccgccgaagtgcgttccaccctgaccaagggcaacggctccctggccacctccggctccgtgtccttcaactttgagcgcaagggccagatcgtggttccgtccgaaggcgtggacttcgacaagctgtttgagaccgcagccgaggctggcgccgaggacgtcaccgatgacgatgaggtctacaccgtcatcaccggcccgtccgatctgttcaccgtgcgcaaggctctgcaggacgccggtttcgactacgattccgccgaccaggtcatgcagccaaagaacgaggtcgagctgagcctcgaggatgcacgcaaggtgtccaagctcatcgacaacctcgatgacctcgacgatgtgcagaacatctactccaactggaccgcctccgacgaggtgatggcccagctcgacgaggagtaatcctcgtgattatccttggcgtcgaccccgggcttacacgctgcggggtcggcgtgatcgaagccggcgagcaccgccggctttcgtttattcacgtggacgtggtgcggtcctcgccggacatcacccaggatctgcgtcttttggccatctataacggcctgtccgagaagatggatcgctttgcacccgatgccgtgtccatcgaacgtgtgttcgcccagtcgaatcgcaacactgtgctcggcaccgcacaggccgccggtcttgccatgctcgcagccgcgcaacgcaatattcccgtggcgctgcataccccgaccgaagcaaagctggccatcaccggcaatggccaagctcagaagatacaggtcgaacgcatggtgacgcgcattctcaatctgaccaagatgcctacgcccgccgatgccgccgacgccctggccttggctatctgccacgcactgcgcccagctggagctctgcagggcggcgagcgcgagcagcatctgaccgccgcgcaacgtcaatgggccgaggccgcgcagaactccgcgcgccgccgcatgaaccacgaccgaggcatgtagtatactttcgaacagttgttcgaagccttaaaggagcgtctgtatgatcggcatgctgaccgggcgggtcgaatcggttgaagccgataccgcattgattgatgttgggggagtgggatacgaggtacgtatgtccgccaccgacctcagccgtctgcacaccggaacggaggcgcgcgtctacacgtatatgaatctttctcaggatgccgtcacgttacatggcttccttgatcaggactccaagaaaacgttcctgcagctcatcaaagtatccggcatcggaccaaaggtcgcgcagtcgctgctctccacactgacggctggccagcttgcccgggccatcgccgacaacgatgccgccgcgctggccaaggcaccgggattgggcaaaaaaggtgcccagaaaatcatcctcgaactcaagggctccattgacctgagccagatcgagggagcttcaccgtcaggcgccaaagttcaggcgcaggtggacaccggcatggagcaggtcattgaaggtctgatttcgctgggctggcgtcagcaggacgcccagcaggccgtggctgaagcctgcgaggacaacgacataccgacaccgcttgccaccgacgatgtgccgcgcgtgctgcgcctagcactcgcactgatggataggggccgctgatgagcaaggacatgaactacggcacatccaacactggagccaatgaagaatcattgcgcatggtgtcttcacaaccgataggcaacgagccggtcagtgatgaagagctccgcccgcatgtgcttgaggggttcatcgggcagccccggctcaaggcccagctccagctgtttctcgacgcagcccgcaaacgtgacgtgccgccggatcacatactgcttgccggccctccaggcctcggtaagaccacattggccatgattgtggccaatgaacttgaagtcccgattcgcgtgacctccggccctgctgtgcagcacgccggcgacctggcttcgatcttgagttcgctggataccggcgaagtactgttcatcgatgagatccaccgtctgccgcgcgcagccgaagagctgctgtatatcgcgatggaggattttcgcgtggatgtgatggtgggcaaaggaccgggcgccagctcgattccactgactctgcctcgcttcaccgtcattggcgccaccacccgcgaaggtatgttgcccagcccgttgcgtgcgcgcttcggcttcaccgcacatcttgacttctatccacatgaggagttggagaagcttatcgaacgctcggcaagcgtgctgggggtcaaccttgatgagggttccgcccatgaactcgcattgcgttcccgcggcacgccgcgtatcgccaaccgtctgctgcgccgcgtgagggattgggccattgtgcatgaccttatcgtcgtgcacccagctgatgtcaaagaggccttggcgctgtaccagattgattccgaaggccttgaccggctggatatcgccgtgctgaacgccattgttcgcaatttcaacggtggtcccatcggcttgaacaacctcgcggccatggtgggcgaggaatcggaaaccgtggaaaccgtctgtgagccgtatctggtgcgcgagggattcatggtgcgcacgcctaaaggccgcgtggccaccgagaaggcatggcagcatctgggcattacgctcaaggatgatgtcagcaagctcttctagacttttcgtgtttgcacacctgacggttcatagccataaccgttcgttttgaaggagtttgcccatggatggttcgtcatcttcctacatcatgcttgtcgtcgtgatcgtcgtcttcggcggcatgatgtggtggcagtccaagaaatccaagcaggcccagcaggagaagcaggattttcgtcgtaacctgcagcccggtactgaagtcatcaccatcggacaggtgattggcaaggtcgtcgaagtcgatgaacagtacgaggagatcgtcatcgactccgaaggctccaagcttcgcttcggtttcaatgccatcgcccgcgagtatgtgcgtcctgcctacgtgtctgacgacgaggttgacgagaacggcaacccactgaccgacgaggacgccgagacccccgcgaatgacgatgccagccaggttccgattgaggcttccatcgagtcctctgaggccacggatgctgagacggacggcggcaacgagaccgagacgaagtaaactgttcgattcggtaccccataagtacgagaaatacgaggcgagcacgcatggcacagtctgatatcaccatcgatgcattggacaaggtaggcaaggaggacaccgaatatctggtgtctctagtgcgttccgtgccgggctttcccaaggaaggcatcattttccgtgatttcatgccggtgctcgccgacgccaaagggctgaggattctgctcaatgcgcttgagcaggccctgccggttccacccagcgagttcgattccatcgcaggcctcgaatcccgcggattcctgtttggcccggccatggccgctcatctgggcaaaggattcatcgccgtacgtaaagcaggcaagctgccgcccgaaaccattggcgaatcctacgacctcgaatatggcacggcaagcgttgaaatcgagaccactgccgtttccaagggcgaacgcgtattgattgtggatgatctcatcgccactggtggcacggccaaagcggctaccgaccttatcgaaaaggccggcggtactgttgtgggcttcagttgcgtgatgcgtttggaaggtcttgacggcctgagcaagcttggttcaacaccaagtagctcgttgatctccatgccggcctgagaattcgcatagttagtttttcgggattcggcatggatgcattcgtgcatcaggccgattcattatctagtcagggaaggatcaatggatctttacgaataccaggcacgtcagctgcttgaggagcaggacatccccaccccgggtgccatctttgctcagaactcccatgaagtcgccgaggctgcggataagatcggctacccgtgtgttatcaaggcgcaggtaaaaatcggtcaccgaggccaggccggcggcgtcaagatcgcgcataaccgcgatgaggccatcctggaatccgaatccatcctgccgatgaccatccacggccataaagtatccggcgtgctggtggccgaagccaagaacatcctgcacgaatactatgtgtccatctccgtggatcgcacctcccgagacttcgacgtgctggcgaccgccaacggcggcaccgaagtcgaggaaatcgccaaagaacatcccgaggcggtcaagcgtctgcacatcgatgcgctcgacgacttcgatctcgaggctgcgaccaagatggcagcgagcattggtttctaccatgctgatgtcgatcaggcggcgcagatcctgctcaagatgtggcagtgcttcaaagacaacgacgcgacactggtggaaatcaatccgctcgcaaaaatcggtgacccggatgacgaatccaccaagcagctgagcgcgctcgatgccaagatttccttggatgacaacgcggcattccgccacgacggttgggcccgtttcgttgatccgatcgttcccgacccgttcgagcagcgcgcccgtgagcatgggctgcattacgtgcatctgcacggcgaagtcggcgtaatcggcaacggtgctggcctggtcatgagttccctggatgccgtatccggcgcgggcgaagagcaggggagcggcatcaagcctgccaacttcctggacatcggcggcggcgcatccgcgactgtgatggccgaaagcttggaaatcgtgctgtccgacccgcaggtcgagtccgtgttcatcaacgtgtacggcggcatcacctcctgcgtggaagtggccaacggcattctcgaagcggtcgccaagctcggcggctccaagcccatcgtcgtccgattcgacggcaatgccgcagccgaaggcctgcacattctggccgaagccaataatccgaatattcacgtgtccgagaccatggagggtgcggcgcagaaggccgctgaactcgccgctgagtcgacccagtccaaggagattcgctgatgctgttcgttgaagataatacccccgttatcgttcagggtatgaccggtcatcagggcatgacccacaccgcacgtatgctcaaggccggcaccaacatcgtcggcggtgtgaatccgcgcaaggcaggcacgtccgtcatgttcccggccgccaagaacggcaccgacgtggatgtgcctgtgttcgccacctgcgacgaggcccgtgaagccactggcgccaaagccagcgtggtgttcgtgccgccgaagttcgccaagtccgccgtcgtcgaagcgatcgaggccggcatcgagcttatcgtggtcatcaccgaaggcattccggtagcggattccgcctactttgttgagctcgccctgcgcaagggcgtgcgtattatcggcccgaactgccccggtctgatcacgctcggcaatccgggcgtcaatctgggcattattcctgatgacatcgttggccgcggcccgctcggactggtttccaagtccggcaccctgacctaccagctgatgggcgaactgtccgatatcggcttcaccgcatgcctcggagccggtggcgatcccatcgtcggcactacactgctcgaagcgctgcaggctttcgaagccgaccctgacaccaaggccgtaatgatgatcggcgaaatcggcggttttgccgaacaggatgccgctgcttgggccaaggaacatatgaccaagccggttgtggcctacatcgccggtttcaccgcccccgaaggcaagcagatgggccatgccggcgccatcgtctccggcggcaagggcaccgctcaggacaagaagaacgcgctcgaagcggccggcattcccgtgggcaagaccccgggccaggctgcccagattatgcgtgacgtacttgccaaggcttccatcaactgatcggccgcaacccatcgtgatgaaagacaggattcgccaatgggtacgaggtgcggcagccgccctcgtatccatgaccatctatgccatcaccttgggctgttacatcgcactgatgttgctcgtcatctccatggaggaggggggcgacaatcttaccgctggcaccactaacctgacgcaggccatcgtgctgctcagcgagggatcggggttcagcaccgactccttcacgctcaccatcacaccgttgctgctcaccgtgctgctcatatggcttattgccacttgcatagcacgattcaaagcattcgctgtgcattcctatgttgtgggattggtggtatggctggccatcaatgcggtattcgcttcatcggtgcaggtaagtctgagtctggttgacgagcaatggatgatattgctcaagagcgccgcgacattcactgtggcgtatcttggagccgctctgccacagtccagtagggtcaaagcggcaatcgcatggatgcgcgagcaggtttccgagcaagtggtcagatgcctgaaatcaggcgttattctggcattcgccatactcgctatcaacctgctcatcggtctgattaccgtcatcacatggaccgtacgcaatcatgccgcagtggtatccgtattcgaattgtccggcatggaaaacggatcgcgcatcctcaccacgcttgccatgctgatttggctgccgaatctcatgctatgggcaatctcttggttgttcggagcaggattctccattggcgaactcgccaacttcacactctggatggggcagtccaacggtctgcccgcagtaccggccttcggcatactccctgagcccattgccgataatctatggcgcacagtaatgctggaaattccgctgggcatcgcctgcattgccggcctactgatgattatcctgccgcagggattcgcctgccgtccactgaatatacgagatgcttccaagcgcggctccgtattggcatccctcatttatgccgctggctcgttctgcttgagcgccatgctcacctcactgatcgcaacgctgctgttcgccatttccaacggatcattgggccagcataggctcgcccatgtcggtgtggatgtcatggcctccacgcgtgccgtaggccatcctatggcatggggacttgccgtggcctggctcatcgcaatagttggcacaacgcttgttttttcgataggctggataatcgagagagtcaaggcttctcgcaccacgtcccgtcaaaccgtcaatccccgtcagacacggtctgatgtcaacgtgcaacaatcacaagaatccaaggaggaacaggatgacaaacacgaaccggccgatacgtcgagcactggtttccgtctttcataaggaaggcatcgaagttctcgccgacgcgttcgtgaaggcaggcaccgaggttgtgtccaccggttcgaccgccaagaagctggccgaactgggagttcatgtcactgaagtgtctgatgtcactggattccccgaatgcctcgatggccgcgtcaagacgctgcacccatacattcacgccggcattctggccgatatgaccaaccctgagcatgccaagcagctcgaggagttcggcatcaagccgttcgatctggtggttgtcaacctgtatccgttcgccgataccgtgcgctccggagccaatgaggccgacaccatcgagaagatcgacattggtggcccgtccatggtgcgaggcgccgccaagaatcacgccaccgtggccatcgtcaccgatccggccgactatgcgctggtcgctgcccgtgtggccgatggcaccggtttctccctggatgagcgcaagtggcttgcagccaaggccttcgcccacaccgccgcctatgacgccaccatcaatgagtggaccgccaagcactggccgaagccggcttccctggacgccgtcgaagtggacaaggacgatcagggcaccgaggtcgattccgccaagttcccggcccagttcacccgcacatgggatcgtgcgcacaccctgcgctacggcgagaactcccaccagcaggccgctctgtacgtggacccgctcaaccagaccggtttcgcccacgccgagcagcttggcggcaagccgatgagctacaacaattatgtggatgccgacgccgcatggcgtaccgtgtgggatatggctccctccatcgccgtggctgtggtcaagcacaacaacccgtgtggtctggccatcggtgccactgctgccgaagcccacaagaaggcccacgcctgcgacccgatgagcgcctacggcggcgtgatcgcctgcaactccacggtcacccttgaaatggccgagagcgtgcgcccgatcttcaccgaagtcatcgtcgcccccgactatgagccggctgctcttgaactactgcagaccaagaagaagaacctgcgcatcctcaaggtggccgagccgccgaagggccacgaggccatccgtcagattgacggcggtctgctcgtgcaggacaccgatttaatcaacgccgttggcgatgatccggatgcgtggaagcttgtggccggtgaagccgccgatgatgccacgctcaaggatcttgtgttcgcatggcgtgcgattcgctgcgtgaagtccaacgccattctgctggcccacgatcaggccacggtcggcatcggcatgggccaggtcaaccgtgtggattcctgccatctggctgtcgaccgcgccaacacactggctgacggcgccgatcgcgccaccggtgcggttgccgcttccgacgcgttcttcccgttcgccgatggcgctcaggtgcttatcgatgcgggcgtcaaggccatcgtgcagcccggcggttccatccgcgatgaggaggtcattgaagcggccaagcaggccggcgtgaccatgtacctcaccggtacccgtcacttcttccactgatcggtacttctggctcccgctggcgggagctgtctcgtgaagcgagactgggggtagtccaccatgaaccatccccagtcagctcccgctggcagctcccgtcagcgggagccatagtattaagagaaccaacacatataagaaagccaccgcaatgcacaatcatccatatgtttccgaagctcacgagggtaagccctggtttgagtggattgtgcttggcgtcgtcgttgtcgccacggtggttgccgctttcggatacacaatggccgccacagtaatcattgctgtgacggccatcattaccgggctcattcgcttgacattgcgagagaagagcccctggaaagtacgctcagtcgcgttcgattccttcatcggcattgctctcggcatcggcctgctgatcacgtacttcagcttctacggcctgctcggcaacgccatcttcggctgagtcctctgcagcctgctcatcggcagcttcgagatcagccatgtcgccctcgtcagtcggctcagccttgggcttggcggtggtggccatctgcacgatgatcatcaccaaagccacaaccgcagcagccagcaccggagcgatccagaacacccacagctgctgcagcgggttctgcgtcagaccctcattcacggcggccacggcgataccggtggaacgagccggattcagaccggcgccggtcaccgggtagctgatggccacggcaatggcgtaggcaatgcccatcgtggctgtataacgatcggagccttcaccgttcttgcccatggtggacatggcggcagccaccacaatcagcgaggcaacgacttcgacgacaatcgccaaggtgatggagaacgtgatgccatactgggtgagcagcgagtaagatacggagcccttctcgaatccgttgacagcgggggagagccagacggtcgaagtcacctgcgcggaagtcggcagcagcttgaccacggcaaagcctgcggcgatggcgccgatgacctgggcaatcacatacaggatgccgtcaaccagcttggtcttggaagccagtacggcggccacagtcacggccgggttgaactgtccgccggaaatgcgggagaagatggcggtgactaccgcgtaggccaggccagtggccacagccatgaataccacgttgacgccgtacacggcggagccccaggtggagaacgcataaatagcaaagcacagcaggaaacttccggccagttcagcgcacacgcgcaggcccagcggctgttgcttggtttcttccatgattcaatatccttttcatcgatatacgaaaggcggcgaaccgcacaaacgtttgcaagtctagcagtagtccgccgctgcggtatgatatataggttggaattggctgagaaaatcggccagccaatcaaatatcaccatcagaattgacagtaacgttcaaactgtccggccacgttgggagaacgatgccaaacgcatattcccgcgccagaagcgcgtatgatgattccaatgccattcgactgcagaagctgcttgctcaagcgggcttcggttcccgccgcaagtgcgaggatatgatcaccgaaggtcgtgttgaggtcgatggcgaacttgttaccgaactcggcacccgcgtcgacccgcataagcagcaggttcgcgtggatggttcccgagtccgggtcaacccaaatcacgttaccctggctctgaacaagccccgtaaggtgctttccgccatggatgacccgaaaggtcgctacacgctgcgtgacattgtgggcgacaagtatgaacgcattttccacatgggccgtctggattacgattccgaaggccttattctcatgacaaatgacggcgaattgtcgcagcacgtcatgcaccccaagtacgaggtggaaaagacttatatcgccacgctggaaggccgcatctccggcacggtgtgccgcaggctcgtgaccaccggtgtacagctcgatgatggatggattaagctcgaccactgcgcgatcattgattcctcccgtgacttcaccatggtcaaagtggtgctgcattccggcaagaaccgtatcgtgcgtcgtatcttcggttccatcggcttcccggtcaagcgtctggtacgcacccaaatcggcccgatcaagcttggtgagttaaagcccggctcataccgcgtgttgtctcaggccgaggttcgttcgctgtccaaggaggtcggactgtgattcgcgttgccatcgacggccccgccggcgtgggtaaatcatccacgtccaaggcgctggccaagtacttcaactatgcatacctggatacgggcgcaatgtaccgcgcctgcgcgtggtggtgcctgaaaagcggcatcgaccttgatgccgagaccgtggatgagcgtgtcatcaccgaaacggtgggggagttcttcaccggagaccatttcgatatttccgtggatcctgacgatccccgcgtgtacgccgatggcgaggacatctccgaggcgattcgttccactgaggtgtccacgcacgtgtccaaagtgtcgaacgttattccggtcaggaacgtgctcattgcggcgcagcgcgcgtacatcgcacgcgaggcgtcgctcgattccttctctggtggactgggtgttgtggccgagggccgtgacatcaccaccgtggtggctcctgatgccgaagtgcgtattctgctgaccgcccgtgaggaggtccgtcaggctcgccgcaccggtcaggccgtcaagggcgtgggagccgaggatgttgccgcacgagataaagccgattccaaggtcaccagcttcctgagcgccgccgacggtgtgaccaccatcgacaactcggacatggacttcgaacacacactggatgtgatgatcaagctgatcgaagatgccatcgagaatcaggaatatgagcgctatgccgccaatctcgaaggctacgatctcgatgaaggcgacgaggagctgatttccggccgtggctttgaagacggagcccgcaagtccggccccaagccggtcggcgtgctggctattgtcggccgcccgaatgtgggcaagtcctctctggtcaatcgcattcttggccgccgtgcagccgtggtggaggacacccccggcgtgactcgtgaccgtgtgagctatgacgcggaatgggccggaaccgatttcaagctcgtggatactggcggctgggaagccgatgtcgaaggcatcgaatcggccatcgcctcacaggctcaggtcgccgtgaccttggccgatgccgtggtgttcgtggtcgatggccaggtcggtatgaccaccaccgacgagcgtatcgtcaagatgctgcgcgcctcgggcaagccggtcgtgctggccgtcaacaaaatcgacgacaacgccagcgaataccttgccgctgagttctggaagctcggtctcggcgaaccgtactccatttctgccatgcacggcaggggagtgggcgacctgttggacgtggcccttggcaagctgaaggaagcggagaaggcttccggttatctcacgccgtccggtctgcgccgcgtggctctagtgggccgcccgaatgtgggcaagtcctccctgctgaaccaactggctcgttcggaacgtgccgtggtcaacgatcttgccggcaccacgcgtgacccggtcgatgagatcgtcgacatcgacggtgaagactggctgtttatcgacaccgctggtatcaagcgtcgccagcacaagctcaccggcgcggaatactattcgtccctgcgcacgcaggccgccatcgagcgttccgaactggcattgattctgttcgacgcctcgcaacccatctccgatcaggatttgaaggtcatgtccaccgccgtggacgctggccgtgccatcgtgctcgtgttcaacaagtgggatgcgatggatgagttcgacaaacagcgtctggaacgtctgtggaacaccgaattcgaccgcgtgatgtgggccgagcgtgtgaacttgtccgccaagaccggttggcacaccaaccgtctggctcgcgcgatgaacactgctttggaatcctgggatcagcgtattcccactggcaagctcaacgcgttcctcggcaggattcaagccgcccacccgcacccgctgcgtggcggcaagcagccgcgcatcctgttcgccacgcaggcgtccacgcgtccgccgcgcttcgtgatctttgccaccggcttccttgagcacggttaccgccgttacatcgagcgtcagctgcgcgaggagttcggctttgaaggcactccgattcagatctcggtgaatattcgagagaagaagaagcgcaagtagtggttatcccttgcggtgttgtctccgttaacccatgggcgcagcaccgcaggacacgcaagacgtacgatgatttgccaaatcgtatccatgtggtaaattatctactcggtgcttttgcaccatcgggccgtagcgcagtttggtagcgcacttgactgggggtcaaggggtcgcgggttcaaatcccgccggcccgactttctaagtccggaatcttaatgattccggacttttccttttctctgacaaggagtacgcgatgttgtcaaatttcaccgaggacaaggatctgggccaaatcagggtcattgccagtgatatggactgcacgttgttggctgacgacggctccatgccaccccacatggatgatctcatccgcaagctcgatgcggcaggcattacgttctgtgcggcaagcggccgcccgaactacacattggccgagatgttcccggaaatccagaaccagatggcgctgatgtcggacaatggcgcggctatctactgccgcggcaagctcatctatgagagcctcattcccgttgaacagtaccaggaaatgattcgttacacgctggccgacggacgcggatgcccaaccgtctgcggcatcgaagcctgctatatccgctcatgcgacgagcgatacgacaactatttccgcacgttctacaagaaaatcgtctacatggacgacctcaccgaacttgaccgcgatgtaaacaaatacacggtgttcttccctgataacaattccgaagaggtctaccgcgagacctatcgcgatgcgtggtcagaccgttacacggtaacaaacgccggcaaaatgtggatcgacatgatgaatcccggtgtggataagggctcggcgcttgctcgcctgtgcgaatacctaggcgtggatatcgcggattcctgcgcgctcggcgatacctacaacgatattcagatgcttgaggcggctggtcacggctgcgtagtggccaatgccgaagagcacatgcacgcgcatgccgactggctggcaccgagcaacaacgataggggcgtcgccaccgtgattgataccattctgcaagcccagaaagccgcctaattcacggattattcactggtgaacacgcaccttgtgtactgtcctgagcccatacggggttacacttgttccttggaatatgacgaaagggacctgaattgaccgaactgaacaatgaagcccagctcagcgtaaacgatgatgccaccgccgagaacaccgcggaagcccacatcgaagaggttttctcacattccgccgccaagatgcgcgagaaaggcatgagcgaaaccgccatcaatcaattccatcgtctctatagcgtatggcagcacgaagaggcatcaaactggatccgagaggacgatgtggcgccgcttgagcaggttcccaacttccacgatgtttacgagaccatcaatcacgacaaggccgtggacgcgtttgcaaaaaccgcgttcctcaagcttaacggcggtctcggcacctccatgggtctggaatgcgccaagtccctgctgcctgtgcgccgccacaaggccaggcaaatgcgcttcatcgacatcatcatcggtcaggtactgaccgcccgtacccgtctgaacgtcgaacttccactgaccttcatgaactccttccgcacctcggcggacaccatgaaggtgctcaagcgcaaccgcaagttcacgcagcacgaaatcccgatggaaatcatccagcatcaggagccaaagctggtcgccgccaccggcgagcccgtcagcttcccggaaaacccggatttggaatggtgcccgccgggacacggcgacctattctccaccatctgggaatccggtctgctcgacgtgctcgaggagcacggcttcaagtatctcttcatctccaattccgataatctcggtgctcgcccctcccgcacgctggcccagcatttcgagaataccggcgcaccgtttatggcagaggttgccatccgcaccaaggccgaccgcaagggcggtcacatcgtgcgtgacaaggtcagcggccgactgatgctgcgcgagatgagtcaggtgcatcctgacgacaaggcagcggctcaggatatcaagaagcacccgtacttcaatacgaactccatctggattcgcattgacgcgctcaaggccaagcttgccgaatacaatggtgtgctgccattgccggtgattcgcaacaagaagaccgtggatcccaccaatccggataccgagcaagtcattcagctcgaaaccgccatgggcgcggccatcggcctgttcaacggtgccatctgcgtgcaggtggatcgtatgcgcttccttccagtgaagaccaccaacgatctgttcatcatgcgttccgatcgcttccatctgacggacacctacgagatggaagatggcaactacatcttcccgaacgtggaacttgatccgcgctattacaagaacatccacgacttcgacgaacgattcccgtacaccgtgccatccttggccgccgccaactcggtgaccatccaaggcgactggacattcggccgtgatgtgatcatgttcgctgatgccaaactcgacgatcagggcgagccgagctacgtgccaaatggcgaatacgtaggcccgcaaggcattgaaccggacgattgggtctgatttcagcaatcatcatggaagaaaaacgacgttatttttgtgaaatggtgtgcagtcgcggaaaaagcctctaagatagagggagtatgagacaaactcatgcacacttataacgaaacaataactacacgtgaggactaatggcagagggcacaagcggacgtcggcgtttttccgataaatggggcaagcacgagctggatgtactggccgtactctcatccgcattcccgcaatggcttacttcccgccaaatcgcacagcgagtcaaggcttacgccgattcctatggggagctggccgatcaggcagctaaggcagcattcgccaagcaattccaacgcgatcgcgccaagctcgccgccatgggcattgccatcgaatcgcgccagcctgaatattcctccaagtccgaaggtcaggatttcgcctcgtaccgcctgcaattgggcgatgaacctcgcatccgtctgatgttcgaagccgaagatatgccggtattggccgccgccaactatctggcccgttccatgtctatctcctccgagcccgatcagactcaggttgcggcacgtacttcacgcaccacacctcgcgtgcctcagaccccgattccgggtcttggtctcgattccatcgccccaggcctcggcacccagcatattccggacaccttggtcaaggtcatcgattcgcgtcgattcgctgcgaccatcgatgtggacggcgaacacctgaacgtggcatacaccgattccgatgatctggccatgttcgtactcgaacacccaggtgccaccatcgtcagcccgcaggaagccgtggatgcctatcatcgtcgtctgcacgcagccagtcagttcacgcttgccgacgagtccgcaagcccggtcagcgcttcggtggtctctcccgcaatcagccgtgacatcagcgaaccgggtgatcccgaatccatcaaggcccagaacaagaaaaacggttccgcattccagaccggcagcgaggtcgaccgtcgactgcgtctgatgctgttcctgtccgcccatcttggcgaagagttctccatgggggagctggccgaacgctttatcggcaagccgaagaatgacgatgaactcaagaagttcgtcaacatcattcataaggacatcaacacactgaccacggtgtccgatgatggggagatggccggcagccagttcttcgacatcgactggccactgttggatgccgaaggcatcgtgtccgccaccaactcgctgggtcttgagcgtcttgccggtatctcaccgcagtacctgagcatgctcaccgcatcggtgagctatctggcacattccccgctgctgcctgacaagcagcgcgcccaggccgaagacctttacgagcgtctgcgtcagcatgtgagccccggccagaccccgtggctgagccttaccggttatgagcttgaaccgcgcagtttctccgtggtcaagcgcgctatcaacaccgactcgctgctggatatggaatacaccgacagcaccggacgcacccgccgcaagctggtggctccctccaagattttcatcgacgaaggtgtctattacgcggctgtctacaccgatgtcggttccgcggcacccaaggacaagaaggcctacgtctccaaagacaagaccatcgacaaggccaacggcaaaccccgcacctggcaggtgctgcgtctagcacgcatcgaaaagaccgaactggtcaagccgaccaagaaaattgacgtaccgaacatgccggtcagcgagctgcgcaagtggagctttgacaacggcaccgaagcggtgttcatcaccgatcagcgtgagttgccgttcatcaagaccctttccggtgccactgtggagcagtgcggtgcgggggagaaggtgcatctgactgtgtcctccgattcctggttcgtggcattctgtatcgcccatgcgcgccacatcaccgcagtcgcccccgaaacgctgcgcacgatgattatcgcccgtgccgagcgagagctcagcatcagcgaaaacaagtaaggagcagacgtcatgccttggtggatatggccgattctggttctgttcatgttggccatgatcgcggccggactagtatacgcgggactacatggattccatgccgtgcaggatatcgcggagattggcggcagacttggcgagcgcgtctccaaaatgggggagcccggcggttccacagaggagagcgaaccaccgctgttcacgcagccgctgaatgtggcgcaggaacgctatgtcgacgcccatgcagaagtgatacagcgcaagaacgtcactcgcgaacgccatatcgcggcttggaacaggtggaagcagttcaacaagtagacgactagtcggaaagcatcatggcacgtcaccctcaccatcaggaaggcgattcttcccgaacgcttagtcctgcccagcgatacgcatcattccagaaagccaataaacacagggcatcggtcgcggctcgttttgccgctacactgccgttcgatcttgacgatttccagaccgaagccaacgacgcattggaggccggcagcaatgtgctggtcgccgcaccgaccggcgcaggcaaaaccgtggtagccgattttgccatctatctggctcaggaacgcaacgtcaaagcgttttataccactcctatcaaggctctcagcaatcagaaataccatgatctggtagacgtatacggcccggataaggtaggcctgctcaccggtgacacctcgatcaattccgaggcggacatcgtggtgatgaccaccgaagtactgcgcaatatgctctacgagcattccaccacgctcaccgcactgcggtatgtgattctggacgaggtgcattaccttgccgaccgcttccgcggtccggtttgggaagaggtcatcattcacctgcccaagacggtgaaaatcgtgggactgtctgccacggtgtccaatgtggaggatttctccaactggatcgcatctgtgcgcggcgagaccaagctggtcatcagcgagcatcgcccggtgccgcttgaacagcacgtcattgtgcaggcggatgaacaaaccgagccggaggtgctggatctgtatcgcagggacggcaacggcaaccagaccacgaagctcaacgccgagttgatcaaccgactcgaccaactggaccgcaaggcggcacgccgccgtggtgaggaacggcccgacaagcgcaggggattcaaaggcaagggcggaaaagggcacaaggatcgcgtaccacgcccggagcgacacacgcctcgccgttgggccgtggtcgacgagctgaactttctgggcatgctacccggcatctacttcatcttctcgcgcaacggctgtgatcaggcggtcgagcagtgcatcaatgccggactggaactgaccaccgatgaggaagtgaccaggattcgccgcatcgtggacgagatggtggaaggtcagctcacccaagaggatctgaaggcgttgcagttctccaagttccgattcgctttggaagaaggattcgcctcacatcatgccggcatgatcgccctgttccgccaaattgtcgagcgcctgtttgaagagggccttgtcaaaatggtgttcgccacggaaacgctggcgctgggcatcaatatgccggcacgctgcgtggtggttgagaagctggagaagttcgacggcatcggtcatgtgggtttgactcccggcgagttcacacagctgaccggacgtgccggccgacgcggcatcgacaccatcggccatgccatcgtggtcgaccatcatggattcgtgcccgccacggccgcggcattgtcttccaagcgtgtgtatccgttgcattccagcttccgtccgacgttcaatatggcggtgaatctgcttaattccagcgactatgggaccgcgcgaatcaccttggatcagtcttttgcccaatgggaagccaatgaatccgcctggcagttggaatcgcagatcaacacgctcaccaatgcattggccggatacgaacaggcgttcgcctgcaatcatggcgatttcaagcagttcatgacgttgcgtatggagctcagcgacatcgagaaggatggccgccgcaaactcaagcacgaggtgttcctgaccgatcaggacagatctcgcgctttccaggacctcgacaagcgcatccagaagctgcgcaaggccgagcacgagcatccatgccgcaattgccccgacctccagcagcacctcaaatgggggcaccgctgggcccgtgagacccgggaactcaatcgggtgaagtatcgttatgactcgcgtaccggctctgtggcacgtcagttcgaccgtatctgcgacatccttacccagctcggctatctggagcggcatgatgacggcaacggccgtatcgacgtgaccctgaccgaaaaaggcctgctgttgcgccgtatttacagcgagcatgatctggaactctgcgaggcgctgcttgccggcactttcgacaagctcgatgccaacgggctggccgcggtactttcctcgctggtgtacgaggccaggcgtggctcggacggcgaaccacggcattatccgggcggcatttccggccctatcgccatcgcatcgtccaaactgcaaggcatctgcgcggatatcaacatcctgtgcgaggatcacagcctggaagaaatgcaccagccggacttcggcatcgtcgacatcatgtacgaatgggccgacggcggttcgctgggtgcatgcctgtacggcacggacatgaccggcggcgactttgtgcgcaccgccaaacgactggccgacgtactgcagcaaatcgccgtggcgcagccattgccgttcgatgggggagaacggttggcggatatcgcccatgaagcggctgatcgtgtgaaccgcggagtcgtggcctattccggcgtcgattaacctttgcttgaccgtctacaccggtcagtcactagcgaacagcggaatagaagccaagtccgaactgttgcgtaaattagtacggtcgaagatttttcaaggaggatgccaatatggcagaacgtagcctcaggggcatgagcatcggcgcgaaatcgctggagtccgatgacaacgtggatttcgccgcgcgaaacgatgtggcgtatgtgtgccctaagggtcaccgcactattctgccgtttgcggaaggtgccgagattcctgacgagtgggagtgccgctgcggttccgtggcccatcgcgaaggcgatgacgaccgtgaggccgatgagatcaccaagccgacccgtacgcactgggacatgttgctggagcgtcgtagcgaggaggagctcgccacattgctcgagaagcgtctgcagatgcaccgcgacggttggattcccgattacgagtgagccaacaacacgtgaacttgatgcccagtcaaaccgactgggcataatcattgctgaagcaatcttgcgaacatgaacaccatagtgaaacaggggagtggacctcatatggcacagcatccgaggaacgtggtcctgctggacctcgacggcacgcttaccaagtccgacggcggcatcatcgcatccgtcatcaagacgttcgaggaattgggtcgcccggttcccgacgatgccgagctgcatcgtttcattggtccggccatcatcgaatcgctgcgacgcaaccatgtgccggaggaagagcttgaccgggcggtcatcatctaccgtagctactatgcggatcgcgccgtgttcgatgatccgaacgagcccggcaacaaagttcccggccgcttggtgaacgtcgtgtttcccggtatccgcgaacagctgctcaagctgcgtgccgacggctattatctggcgttggccagctgcaagcccgagtaccaatgcgttccgatctgtgaacacttccatctgaccgaattgctggatggcatttatggcgcttccaaggacaactctcgcttggataaggatcaggtcatccgttattgctttgacaaaatcggttttgatgcttcggcaggggataaggccgtgatgatcggcgatcgctacaccgacatcgatggcgcacacgcctgcgggctggacaccatcggctgccgttggggttacgccccggccggcgagatggaagaacacggcgtttacgagatcatcgagaagcccgagcagatcgaagaagccgtaaaccgttatttccaaacgcactgaaacacaacggcgaggacttcttcatgatgggatgcgatgaagcctgcgccgcgagcttcgacctggttttcatcggtttgccgttgctgtcgctgtatgagattcccatgctgatatggttcatttggcgagcattccactggaaacgaaatgacaaggattggctgaaaggcacggcgattcttgcaattgcggtggtcgctccggtgctcctttggctgtcggccttttggctgtcggcctggtatgcgtggactagttgatacaggcgactgaatcctcgtcaaggataactaatctgacataacgtacattatcggcttccagtgtcatcgtcgttcttacgtacagaggcaccaatacgccgatccattgcagtctccgaagcgttgcgcgcctggaaatacatggcgacgttctccagcaacaccagaacgaatacgatgacagctgcgggcaactgcgctgcgtcgcagaaatctctcagacgcgcatccatggaatccgcgagaaaaacgaatacaggaaacggtatcaacgccattacaaacgacagaaaatgcattttgacgatggaccagtcaaccggctcagtcgccggacgctttgcccgcggcgtgaatatgtggccttgacctatcgtaaacgtgataatggcgacggccataatgacggcgacgagccagagcacgattggcaggaactcaatgactatacccattgcatcaatccttcagcactgtattctgcaagattactcgatcattgcacgcccataatgaaaaaacgacctgccggaaacccggcaagtcgccatcatacaaacctgctgcgaaatcaagcggcctcacgctgtagacgctgcgcctcaagcttcttgcgcatacgcatggcggtcaattcgtcaatcgggcgattcatggaaaccgtcatcggcttgccatcaagatcgacgtaatcctcatcctccagagcggtttcaatctgatgccacagtgagccgaccgacacggcgaacacggccttgccgctttgcagcagctcaagcatctgctcgctggtcgtgcattcgtgcacgttctggccgtcgcacatgatggtcacgttggccagctgatcggtggtgtgctgggtaaggaagccgatggctgcagtcacgttctgcagattcacgccggcatccagcagcttcttggagacggccagaatcaccacgtccttgaacgaatacaaacgacgggagccggatccgtgcgatggcgtgatggacggttcgacaatttgcttgcgcgcccagtaatcaagctgacggtaagtgataccggcaaccttggaagctacagtaccgcgatatccacgcttgatttcctcggaatcggcgttggcgaacaactccccctggatagcgccatcattgagatcttcacgctcatcaagcggaatatgaagatgcagctcagtctcgcccatcttgactcccctaactcacactggtgtaatcacacgattgcaattcttcaccaagtgtaaccccacataatgtgtcggttattgggagacaaaggcagatttcgtgaagaacaccagacggaacttgccaatcatgatttcatcgccgtttttaagcaccgcctgatcaacgcgctggcggttcacataggtgccattgaggcttccggcatcgataacggaatactggccattgacccggcggaacacggcgtgctgccgggatacggtggaatcgtccagcagaatatccgctcggggatcgcgaccaacagtgatttcatcctcatcaagcagataccgcgaaccagacaccgctcccctggtcgagataagcaacgccgtcccctcggacaggcgtgtaatggtgtccaaatcctcctgagtcagaggacggtcgccggttgcggtaacgggcaatacgttaatagcaggcaatccaatgatggtggtttcgcctgcgctaggaatcggatcagtcatagcttcctattctaccgtctttgcatacttattttgcgtagcttcacgcacttcatcaataatgacgttatcggaggcttcgacattaacattagctccatacttgacctgcagctgggcacccactcccccggcgatgtcaactgcgttggaaagctcctgcggattgcctatagccttgaccacatacggaggtttgatggccgtgccatcggaaatcagcccttcgtcagcatcttgaatataggtcgatgcgacaacgcgaacctcgttgatggcaatgacttcggcgccggcattgcgcagctcttcgatgaggttgaacatgatcgaagcgtcgattctggatgtcgaaccgcggctgaccgtaaccgtaatacccttgcccttggccgggagccggccggaaatcagaccactggtttcctcgttctgcttggcgatcttacgcgcttgttcctgctcgttggcagccgacttcaacgagttcagctgactggtcagctgggttttgcgctgctcgaggttggatatctgcgtgttcgactcgttgagcagacgaaccagctcgttctcatccatcgtttcataggtggatttggtgttgttgatctgactcatgtaggcaaagcccagcaatgcgcacatcagcatgatgaagatcgacgatatcagtcgggaacgatcggaattccggttcaggttcttacgcggctttttgcgtatagtggggaacgaaccggtttccatgcggtcgttcgccttatcttgggcatgctggtcatgcattttgtccagcatgttgtttgatttagctcttcgtaccatatcagcctcggaagatgaaccggcgaatggcggacacgttggagaagatacggatgccgagcactacaataacggcggtctgcagctgtgagccgacgccgagctgattaccgaggaacaccagcaaggttgccgtcagcacgttggccaggaacgatatgacgaatacacggtcagagaagcttcgttcaaagtacgcgcgtgcagcgcccagcagtgcgtcgatggcggccaccaccataatcggcagatagggttgcaagacgaccggaatgtccggcttgacaaacacaccgattaccacgccgataatcagacctaggacggctgccattattcgttcctctctgcgtattgggtttcgccagccactgctgcctcaagtgtaatcgaattagacttgtttacctgcggataaatacctgcttgtttgaaggaatcgtacaggcttgctaaattctttgatcccatagcttcggccaacgtgttcttgtctccgatggcttcaatggtgtacgggctttcgatggcattcacgccaatgagaatatgcccacccgccttacggatggaggtctgtgcaccgagcctattgccgttgatggagacggcttcggctccattttggaacatcagcgataccagctgctgcaaatcaagatccgtgacgacgcgaatcttgctggtggtacccactctggtggaggtggattggtcggactggctcgccgcaataggatcggccaatgtcatggtgatgccttcaccggtgacggccacggcaccgatgaccaattcatcctgaatcagcgtgtcgcttttgacctttccggagaccttcttcgactgctcgtcgacttgggccttgaccgcattcacatctttggtgagctgttcgatttgcgcattgcggttttcgagttggccggccaacgtctgacgcacctgtttgcgcggatcggactgcagctgctggacgaacaggcaccccgcaaacccgacaccgacgcaaatcaggaaaacgatgatgcgattgaaccagatggaaaatgcagatcgctgctcatggaccagtctcgaatcggagaacatgggatccatcggacggttcacgagatcgtcgatgagttgcagggaatcatcgttggttttacggcgacgacgtccgcgaacggccgcggcatcatcgggagacaaagcatggtgggattccacagaccgaaatgcacgggaaaaaatggcacgacggcgtactggctcattctcttctggtacggggaatgagaccggcgctgtggaatcaggctccattccgctcctccaattccttgcgcaacaagctcacaccttgtttggtgtagatatatccggccaaccagtacatggcaatgccccaaatccctgcggcaagcgcggcaagatagagcaggtggaagaaggcgttggtgccaagatcagcgaaaatcaggctgacgatggaaatcatcaataatgcggtgcccgctttgcccacgaaatgcaccggcaacggaccatatccatattgggcaagccacagcacctgaattgccatccacaagtcgcgcaaacccacaatgatcagcatccaccaggggatgacgccggcgacgccgagagccagaatcgagcagaaaatcaacaggcgatcggctaccgggtcaagaatctgcccgattttgctgacttggttgaatctgcgcgcgatgatgccatcgagtccgtcagaagcggaggagatggcgataagcgccaacgccgcaatcatctcatgccgagagatcagcgcggagatgaatggaatcgagatgattctcaacgcgctgatcagattcggcacagtgaaatacaggtcacgcgcctctggactgtatctgctgctgagtttgtggtctgtcatatcgccaaatagtctacatggtttacatgcgagaggcttgcaatgcggtgacgatgatgcctcgagcaccgacttcgtacaaatcgtccatcagctggttgaccttggccttgggcaccatgacgcgcacggcgttccactgcttgtcgtgcagcggggagatagtggggctctcaaaaccgggggtcacggccacggctgcagacaccttgcttacggggatgtcgtaatccataagcacgtactggtgtgcggtcagcacgccttgcagacggcgggtgagtacggcgagacgggagtccttctcgtccagacgcggagagcgaatcaggcacgcttcggagtgcatcagcgggtcggaaaaaacgcgcagaccggcgttgcgcagcgtggtaccggtggagaccacgtcggcgatgaggtcggccacgcccagctgcacggaggattccacggcaccatccaggtggatggtttcagcttcgataccgtgttcgacgaggtattcatgcaccagcttgtcgaaggtggtggccacgcgcttgccctgaatgtcttccagagtggtgatcggggattcgttcggagcagcgaagcggaatgtggaggagccaaagccgagcggcatgtgctcgagtgcggcggtaccggaattcttcagcagatcttgtccggtaatgcccacatcaatggcaccgcggcccacgtacaccgcgatatccaacggacgcaggtagaacagctcgatgccgttgtcttcatcctggacgacgagctgacgaggattagtgcgcagacggtagccggcctcggccagcatgttccacgcgggttctgacaacatgcccttattgggcactgcgattctcagcatgaatgctcctctcccctgttgggagttcgatgcgctgcggttactgcgttttgtggggattaccggcagaattgccagcgaatcccttgtgcttgattcagtgttctgcggccgcggaacagcgatcacaggtgcttgtagacgtcctcgagggtcaggccgtgcttgatcatcatgacctgaacatggtagagcagctggctcatctcctcggcggtgcgatccgcgccctcgtactcggcggccatccaggtttcgccggcctcttcgatgatcttcttgccgatgaagtgggtgcccttgtcgagctcatcgacagtcagggagccttcgggacggatcttggccttttcggacagttcggcgaacagggattcaaacgtcttcatgattatcttttctttgttgcttctgctgaggtaatgggcgcgctgcggctcaggccttaaacgcggcctcggccttggcacggatgtcatcgacggcctgggcggggttctcagcgccatatacggcggaaccggccacgagcacgtcggcgccggcttcggccacgatgtgcgcggtcttggggctcacgccaccgtcgacctgaatgcgggtcttcagtccgcgacgggtgatttcgtcgcgtagacggcgaaccttggccatctggttgtcgaggaacttctggccgccgaagccgggctccacggtcatgatgagcaccatgtcgaactcatcgaggatgtcgaaaatcggctcgaccggttcggccggacgcacggcgaagctcgccttgcagcccatttcgcgcagctggcgtgccagacgtaccggggcatgggtggcacccatgtggaaggagaccgaagcggcaccgagcttggcgtattcgggggcccaacgatccggatcctcgatcatcaggtgcacgtcgacgggaaggtcggtgacctcgcagatgcggccaacgatgggctcgccaagggtcaggttcggcacgaaatgatgatccatcacgtcgacgtgaaccaaatcggcattggagatggccttgaggtcacgttcgaggttgcagaaatcagcggacaggatgctgggtgcgattgcgatattgctcatggtttcctaccttatctgtgcaatgggacttggagccccgtgtttcgtgctgtttggacgctgttctttccagtgttacttattttgcatattgccgcgctgggctttcttctggcgcagtcgttcttcttcgatgctctggcgttcgagctcgtcggcggtgaccgccgcaagttgccgggcctgtaccttggagtcagggccatgctggtagagcacgacgaacaggatgcagccgatcacgaagacgatgatggcggtccagacgttggtgcgcaaccccagaatcactgtggagtagttgatgcgcacgttttcgatccaggtgcggcccagtccgtaccacatcaggtacatggcaaactgctggccagccctaaggcggtcggcgagcttatggccaaggtagatgatgatcgcggcgccgatgaggttccagatcatctcatacaggaatgtggggtggaacagggtggttttgtagtcggggcactcagcgccggaatagcagatttcggatttgccgatggcgtccgcgtcgttgagtttcagaccccaaggcagggtggtgggccacccgtagagttcctggttgaaccagttgccgagtcggccgatggcctgggccacgggcagcgcgggggcgatggcgtcggcgaagatcgcgaacgggtaatgcttgtggcggcaccataggaacgccaccagcgtgcccacggagataccgccgaagatggccatgccgccttcccacaccttgaggatgttgatcaggttgccggtgggcgggaagtagtcggccggcgtggtgatgcagtggtagaggcgtgcgcccaccagagcgcagggcacggtgacgagcgtggtgtcgagaatctggtcaaaggtgccgccgtagcgcttccagcgcgtggtgaggatccacacagccacgcagatgccaatcaggatgcagattgcatacatgtggatggtaaacgggccgacctggaatttagagaaggtcggcgaggggatataggccagattcatcgtgcctcacttactcgtattcgctaatgccgcctgccatactaccgcatggaaaccgggactcgaggaacgcctcacgctttggcagcgtactcgtttcatatgtgtcgagcctcagggtccaagcttttcctcgatggcttcgatggcggataatccctttaccagggcgcatgcggcaatccatgacggaagcaggtgccgaatacgccctgattctaggggcggcaggtcttagcgtgcgttgtggatgccttcggccagttcctcgctcttggcggcgagcagcttcaagccttccttcgggtcgcgtgcggtcttgttgtcgtccgcgagcagggtgtgcacgagcgcggagccgacgatgacgccgtccgcgtaggagccgaccttggcgccctgttcggcggtggacacgccgatgcccacgcacacgttctcggcaccggcctgacgggtacgttccacgaggagttcgggcgaggcgtcgatggtggcgcgctctccggtgacgcccatgcgggcggccgcgtacacgaagccgcgcgcgttgcgggccacggttttgaggcgctcggtggatgagtccggggagaccaggaagatgcggtcgagtccgtggcggtcggaggcttcgatccactcccccgcctcgtccgggataaggtccggggtgatgagaccggcgccgccggcgttctcgaagtcgcgggcgaagcgctcgacgccgtagtggtacacgaggttccagtagctcatgatgagcggcacgccgccggcgttggccacggtttcgacggcctcgaacacgcgcttgatggtctcgccgttgttcagggcgatggaggcggcagcctggatgaccgggccgtccatgaccgggtcggagtacggcaggccgatttccacggcgtcgacgccgtgctcgaccatcgttttgaaggcgtcaagcgagacgtctgggttggggaagccatagggcaggtagccgatgaaggcgggcttgttctcggccttgaacttggtgaacatagcgcccgacttgctgggcttgtggctgatgcccagcggctggccggacggcgtggttgcttcgttggtcataatcaaaaatctcctcttcttgttcaggcggcggtgtcgccgtgggcgccggccacatcgagcgcggcggcctgatcgtcggtcaggtagccaaaccacttgccggcggtggccatgtccttgtcgccccggccggagatgttcacgatcatcacggccttgttatagcccttggccttcagatccgcggcggccttgtacgcgccggccacggcgtgcgagctttcgatggcggggatgatgccctcgctctggcttaggtcgcggaaggcgttcatggcctcctcatcggtggcccagctgtagttcacgcggccaatgtccttgagccatgcgtgctctggccccacggaagcgtagtcaaggcctgcagagatcgagtaggtatcgagcgtctggccttcgtcggtttccagcaggtagctcttggcaccctggaacatgccgagctggccggtgccgggggcgaagcggatagcgtgctggccggattcggggccgttgccgccggcttcgtagccgtagaggttcacgcggtcatcgtccaggaaggcgttcatcacgccgatggcgttggagccgccgcccacgcaagcgcaaatcgcgtccggatggtcgatgccgtaccagtcctgaagctgctgcttggcttcctcgccgatgatcttctggaagtcgcgcaccatggccgggaacgggtgcgggcctgcgacggtgccgagcaggtagtgcgtgtccttgacgttggtgacccagtcacgcagggcctcgttgatggcatccttcagaatcttgtcgccgagggtcacctcgaccacttcggcgccgagcatacgcatgcgggccacgttcagggcctggcggcgggcgtcgatctggcccatgtagatgcggcacttgaggccaagcatagcgcacacggtagcggtggccacgccgtgctggccggcaccggtttcggcgatcacgcgtgtcttgcccatgcgcttgacgagcaaggcctgtccgagcgcgttgttgatcttgtgcgcaccggtgtggttcaaatcctcgcgcttgaggaagatacgggcgtcgaggccggtcttctccttgacgagtgcggcgaagcgcggggcttcggtcagcgggctcgggcggcccacgtaacgctgctggagcgtcatgaattccttgtggaattcggggtcggccttggcttgcgtgtagacgcgctcaagctcgtcgagggcggtgatgagggcctcgggcacatagcggccgccgaactgaccccaatacggtccctgatgttcgctgagcggggttgtttcggatgctttcacttgtgctcctgcctttactagtcgttccactgcacgttcatgatcgtcggcggtggccacgccctcgccgaccagtaccgcgtccgctcccgcgcgggcgtagtcttcgacctcgaccgcgccgaatacgccggattccgccaccttgatgacgtcatcgggcagatcggccgcgagttcgttgtatttgttcacgtccaccttgaggttcttcaggttgcgcgcgttgatgccgatcaccttggcgccggcctgacatgcgcgttcgatctcctcgcgggtgtgcgtttcgaccagcacggtcatgctcaactcgtgcgccaaatccagcagatgtttgagctgggcgtcgtccaatgcggcgacgatgagcagcaccaaatcggcaccgtgggcgcgggcttcgtagatctggtagtcggtgacgatgaagtccttgcgcagcaccggaatatgcacggcggcgcggaccttgtcgaaatcatcaaggctgccgaggaatttgcgaccttcagtgagcacggaaatggcgcttgcgccgcccttctcgtactcgcgggccaacgcggccgggtccgggatgtcggagaggtggcccttggacggggacgcgcgcttgatttcggcgatcaccgggatgccatcggcgcgcttgagccatcgtgttgcgtcaatcggagccggggccgccagcgcggccttcttcacatcctcaagagacgcggtgagctcgcgggtttgctggtcctccagtgcgcccgccaccaattcgtccaaaaccgacatggtcctccctttgttggtgttcggtcatgcgccactctaggtcacgccccgtccttattgccttgtgcgtcctacattctgggctattcctcgttggttcgtatcgctacggaaccagagcggccaacaaaaggaagatcgccatgaatatcggtcatacggcctgggattgattccattgatagtatagactgggtgcatgtgcaggagattcgcgctcgatttggattgggatgccgtggcctcacagttcgcggtagacgaggatgacgtgcgcgttggcactctgccacagccttcctacaacatcgcacccacgcagaacattggcgtggtggcacagggcaaggatggccgccgtcatctgaccggtgcctattggtcgctggtgccgcgatggagcgccagcaaagtgctgagctaccccacatataatgcgcgtgtggagtctgcgcatgtcaagccggcgttcgccgaatccacaaaatccatgcgagccatcatccccgcttccggctactacgaatggaaaggtcgcaggccgttctattttcacgcaccacatgatgaactattgtctttggccggcctgtactcatggtggaggccgtctcccgcatcgccatggcagctgaccgcaaccatcatcacctgccctgccgcggacgagttcgtcaaggtgcatgatcgcatgcccctgctggcgcctcggaatatggttgcctcatggctggaccgctccgttgacggagccgcactgttagattccatgcgggaaacgggtaccatgctttctcggcgtctgcaatttcacgaagtcgcgccactgaacagcgacggcaaacgtcttattcagccattggattccaccgaacccatgcgtctgttttgagctcttgcagctggaaccggctatgcagctgtatatgaagacggatcaatcaacgccccactgatagctaacctcgtatggccctcagtcaaaaacaggtctcttctgctcgacattggtcgactacgactacttttgcatcaatccgcgcaacaactcgatctcgtcgcgatgcgtggcgggcgtctgctccttggtttcgaggatcatcgggagcttggccatgatcgggtcgttgaccagtcgcgtgaaaaacgggatgccgagctggccctccccgatgttggcgtgacgatccttatgcgagtcgaggccaaactgcgaatcattcacgtgaatcgccttgaccttggccaatccgatcaccacatccaactgatgcatcacgccatcgtagtcgttcaccaagtcgtatccggcatccagcacatggcaggtgtcaaacgtgacgccgacgtccgccttgttctccacgccgttcatgatcgtggcgagctcctcgaagttgcgcccgcattccgtgcctttgccggccatggtctccagcaacaccataacgccatccgcacgctcaaacacctgattcagcccctcgctaatcagccggcagccggtctcggcgccttggcccacatgcgcgccgggatgaatgttgatatatacctcctggccggcctcgcggatggcggtcagcagcttgatatcctcggccagcgcctcgatggcgaatgcgcgcttggcctcatccttgccggccagattgtagacgtacggcgcatggacgaccaacggcccatagccttcggccccgagctgtgcgccgaacgccgccgcgccggccaggtcgagagccttggaacgtttgccatacggagatcgcgggaagaacgcgaacgcggtgccgccctcctcatgggagcgtttcagcagctcgttccagccaccggccgtcgacaaatgcgatccgataagcaaacccgtcatttcacttccgcctttcgtgagccgtttcatctaccgctatcatatggtaggcggcatcgagtgcagcccgcacaaccgacatgaggcacaaccctctgaccatccgaccatctgaccgaaggagacctaagcatggcgtcagccggcaattccaaggacgacaccggcctcgaacggaaaatggagtcgcgccacctgacgatgatctccctgggcggcgtaatcggtaccggcctgttcgtcagctccggttacacgattcatcaggccggacctttgggcgcgatcctcgcctacgcggtcggttccttgctcgtctactgtgtaatggtctcgctgggcgagctgtccgtggccatgccgtatgccggcagtttccacatgtatgcgaagcgattcatcggacccggcaccgcattcaccatcgccatcctgtattggctgaactgggcggtggcgctcgcctccgaatttacggcggcagggctgttgatgcaacgatggtttcctcattcgccgtcctgggtgtggtcggccgtgttcattgcggtggtgttcgcgctcaacatcatgtccgtgcggctatatggtgaggcggagttctggttcgcgtcaatcaaagtgttcgccatcatcgcgttcattgtgatcggcctgctggcaatcttcggcgccataccgattgccagtcatgattccgcgccgttgctgggcaacttcgtggccgacggctggttcccaagcggtatcgcgccgattttctcgactctgctgaccgtggtgttcgcgttctccggcaccgaagtggtgggcgtggcggccggcgaaaccaaggatccctcgcgtgcgattcccaaggccgtgcacaccacggtgctgcgcctggcgattttcttcatcggctcgattctggtgatggcggccttgatcccctggcatcaggccggcgtggatacgagcccgttcgtgctggtgttccagtcaatcggtatgccgttcgccggcgacatcatgaacttcgtggtgctcacggctgtgctttccgccgcgaactccggcctgtacgtgtgctcgcgcatggtgtggtcgctggccaaggagcggctgatcccggcgcgcttcgccaagacgaatttccgcggcgtgccggtgtgggccgtactgttcagcatggcgggttcgctgctggcgctgctgtcttccgtgatcgccgcttcgactgtgtatctggtgttggtcgccgtatccggcttggcgacgctggtggtgtggttctccgtgtgcgtgtgccatatccggtttaggcgtgaatggacgcgggacgggcacagcgccgacgaactcggctatcgcgctcccggtttcccggtgctgccgtggctggccatcgtgatgtgcatcggcgcgctggtgctcgtggtgctcgatgagacgcagcgttcgaccctgtattgcatgatcccgttcgttgcctgctgctacgcggcctattacgccctcgaacggcagcgtaaacgcgaaaacaacgcctaactcgatttcgaggggctgatttggcgcttaccggagatctatctccgtttcaaggggctgatgcccaagtagacaaggctccacaatggcgtcatgtcgttgccacaaagccgcttatactcgcggtttggcgtttgagcagcccctcgaaagccaagtagatgtccccaccggacgaaatcagcccctcgaagccgagaaaccattgatggccgattatgttgcgcccggtgacgtgcctggtcccgtgctcgaactggtacaacaattggagtttggtttttgcaaaggggcattgttatgtacaagatgttggtgtcgttcgcagacagctaatgcgcgttgactcgtcgcgctaagccgtggtcaccgtttgggcccgcggcgcttctgttgtgccatttccctaacctgtacatttcgtcatattcgagtttcacttgtcttcacgtgtcgcgttgccgccgccgtgcttgcgctcccgaccgtgatcggctgactgctgcaacagccgggtcttggcttcacggcggtgatgggcatggctgtggtctgtgccatggctggactggtcgttgcattgattggtccgctgcgtcggatctcaacccccgaccggtggagcgaatccgagctgtgaatgcagcgaacgcatattccgcgcccggatgtcggtgcggaacgtactcaaccgtcagccagacggacacactcctgctgactgacggtcatattattggcatacggtggttgagtcatccactagcatgattcataccactgctggatggtatggaattcacagtacgaattatcagccatgtcaaatcaggtcgtacggcatctgatgcttgaccaaccagaagatgccgaggccgatgaacaccagcagattgaatccgccgctatgccatggcagcacgatgattagcgtcgccatacgcgccacatagaacgccgcacgccgccagccttctcgcggccgggtttccactgtcatgtgcgtgaaactgccgccgaacgtgcagccgccgcgcaaccatggcaccacgccctcgaagaggatgagcgccgccaggaagaggatcgaaccggtccagtcgaacggttccatcgactgccatgagccattggagcccgagggcaggttcgagcggacgatcatgacgaacagatgcgtcggcatcacggcgaacgcgatcagcgccatgtcgatgatgaacgtgatcagccgcctcatgaagccaggtgtggtggtcggcgtcatatcggcgacccgcgccggaatcaggcgcagcgaaagcatggccagcgcgaatccgatcagcgcgccggtcgtgttccacaggagatcgtccacgtcgaacagacggtaggcgcacgggaacacgcccatgaggccggtcagctgcatcgtctccagaaacagcgacgtggcgaatgacagtactgcggtaaccggcagcggccaacgccagatacggcccatgatgaagcctaacggcaggaagaacacgatattaaacgcgatttgcagtacggcggtgagaccatcggtacggatgtcaccgatgaactgcaatggattgagctgtggcgtcagatggtgcgcggcgcaataggctgccgcatcggccggcatcggatacagtgtgaagcacagcaggccgagcaggtacagcaccgtgccatacgccactatggccgacgacagtcggatgcgattgtcgcgatgatacagcaacgccagcaccggcaccgtcagcagcatggacacaaacggccacaatgccagcgcgaacgcaaacggttcagaaaagttcttgagaaatcccatcttcaatgctccctgcttcggtccgctccattcggtttcggaccatatctctcgacttctgattccaaggtacggaacatgacggcatgcgggtatcggccacgagagcgaaatcattgggatgaaaggcgattcgtatcattcgcatggatgagggagatgcaccagttaccattgacgccgacgagaatggcgtggtcggcgccgtgaccgcgcagatgagcgagcgtacgtcgttcatcgtgttggaccagattacttccgccaccgctatgctgtttccggcccagcgcatcgccgccgaagcccatcgccgcggcatccgcattttggttgatggcgcgcacgctcccgcccagctggccgatccggtcggcggactgcagtccgattgggtgggtcggcaatttccataagttcccgtgtgcgccgcgcggtacggcattgctggtgattccgcccgaaggcggtcaggatggtcaggatttgtggccgttgatcgactcgtggggtttcgccgacccgttcccggagcgattcgacgagcaaggcacccaggatttatgcggtccgatcgccgcgcccgagtccttgcgtgatatcgagcgcctgtggggctgggatgtcgtgcgccggtacatgtccgatcttgccgattacacggagcgtcgggtatccgaggcggccagcgaggtcggcggcgaggactgctcgtcgccggtgcgcattccctcccccgccatgcgcctggtgaagctgccccacggaaaccgcacgccgcaggaactggacgccctatgcccggtattccgtgaccgaatccccaacgaactgcacgccgaagtcgcggtcacccagttcgacggcgaactgtacctgcgcctcaccgcccacgcctacgtcaccgccgacgccatagaccgcttcgccgaacaatctatcccaaccatcgtcggatggctgcgtgggtaagcgaatcgtatgttgcattggtgccttaactatggatgattaaggcgccaatgcaacagtattagagttttgcgggttgtagagctgcttacagaaaatttgcggttgaacggcagccccaatcttccgccacagtggcttgacgaaatcttcgccattgaagtagccggcgatggtatccgtggattatccacgcctatctgctgagcaaagccgcggcgcagggcgtggaactgacgccgttcacggcgctacgcggaaatccgcacgattattggttcctcgacggcgactttatcgaccgaggcgaaattgattaaaaccgattgataatcggctatttatacgcgagaggcgccgtcaattgcctcgcgcatagaggccatcgctctccgtgcaggtggcgatgcgtgtgtagtattccgtcttgtcctcatggtcgatacgtgcgccgcaatgctgctgcaccgcaagacttgccggattggttttgtggacactcaggtaagcctccttgatgccgagctcgcgggccttggcaagcgtgagcttgagcccggcggtcgcgtagccgtggccgcggtattcgcgggcgacaccgtagccgatgtggcccggaccgttgcgcaggaagtcggtgagccggtgacgcaggttgaagatgcccacatagtcgccctcatcgttgacgagaatgtatttggtggctggcacccagccgtccggcaggccgacgccaagcgactcatcacgcaaccctcgcacatatgcggcgaaccgttcacgattcatgccggccgctgggttctcgaatcccgtctcctccgccgggaatttcgcgaacaagtcaaacgcgcgttcctggtccgccagccatgtttcaatcagccgcattggtcacactcctcctgttgacacagcaaaccacactactactgctcggccaacggccgcaagccttatctaattggccattcctcgacagtaatgcgacgtacgagctcatcacgatatacgggttataggaactaaacgtggtgtttatgttccgggtttggccttgtggcagtaagcgtgtcggggtgcttttaatgtggcgtcgcattaaagggccgtggtttggccgtccctcgcctgttccgcagacgcatccaatggtgctggaacatccggcccgagatcccgcctgtcactgcgaggcatcggactgtctaatacctaatacattgtagccaatccaacacgagcgtggaacagctgcgctcggacgtcaaccggtacgtctggtggtacaaccaccaacggctccactcgaccctcgattacatgagtcccgtggagttcgccaaacaaggaaagaccctctagaaacagtccaacacaccgttgccaatccactgttatccgacgtcgggaccggcagcgtatcgtcatggaaccgttccgacaacgccgatgattacgagcaggtcatcggttttctccaactcggcgtcaccgtcaccgcgatattactgttgtcggtatccgccatcggcatgatcaacatcggattggccggcatcgagcaacgctcgcacgagctgctcatccgccgcgcactgggcgcgaccagagccagcatagccatacaggtcatcggctcgtcagtgctgctcagcctcatcatcgccttcgccgcggtgctcatctccgcggtgctggtctgggcaattccgtggatgatgcccgccgactcgccgctggaaccgcccgcatacccatatacggcggcgatgattgcggcctgtgcgtccatcgtcacctcgcttgtcggctctcttgccccggccatcaaagccatacggctgcaacccgcgctggcgttgcgatgaaccagaagccattctggacaagcccgccgacagctggatggtcggcattccgatcatcgattgcatccggtaaacaatccgcttgcgggatgtgtaccatggtcgagatgccgcaaccgcagaatgttgactattagcatacaaatacatactattgtcttacgtaatgatgttggaggttaatgtgagcatggcatccgtcacagtccgcgtggatgcggacaccaagcagaaagccgcaaacatagccgaggatctcggtctggacttgtcttcggtcacccgcgccttctacaagcagattgtccgggagaagcgcattcccctaaacctttcctatacgaccgtgccgcctgagaccatggaggcccttgacgaggcgaagaacaggctcgccgacggccaacctcgcttcaacagtgccgatgagatgttcgattcgttgggaatctgatcaatgctcaaaccggattacacggcggcattccagcgagatatcaagaagctcaaacgcaagcacgctgatttacgcccgctgaaagaagtcattcgtctggtgcttgaggacacggcggactccaaggaagcattgaggcgtaggcatcgcacccacacacttaccggtgatctaaacggcgtactggaatgccacatcggcaatgccggcgactggctgcttctatggattcgcgatgatggcaccgccatgttcatgcgaaccggcagccatgacgaactgttgggcaaatagcgggtttatagcctgctttgaaccagccgacggcgatttgagtgcggcagccggccgtgcccgcagaagtcggcatcgcctcgctgctgttcgcgattggcaccgcgatgccgtggatcatgccgagcgtcacgggcatgtacctgtatgcgggcatcgccggctcggctacggcgtgtactcagccatcgaccaagcgctcaacgtcgacgtgctgccgaacaaggaagaggccggtaaggacctcggcatcctcaacctggccaccacgctcggccaggcggtgggccccaccatcacctcgacggtaaagaccgcgaccggagctttacgcctgcattcgccatctccatcatcatggccgtgtgcgccgccgtgttcgtgctgcgcattcagaaggtgaagtagacgctgcaaagtgcccatctccgtttcgaggggctgattttgactttgcggaacatctatctccatttcgaggggctgatgccaaagtagctactggtcaaaaacaacggaatgacgttggagtaatgccatttctatccgcgatctggcagttgaccagccccttgaaacgggagtagacctccgacaagcacgaaatcagcccctcgaaactgaatttggctcaatgcatcgcctggcgcaactatatccccggtgcgggtatactatttcgggccgtcacgatgacatccacggaacgcacgcatggcaaagagagaagcatgagtcagcccgataccgacatggcaaagcagtcgccgtcctcgcaacaggaaacgcggattaggatggatgccccgcagcataagccaaatcaggcagacgaatcgagcgcattaggcgagcagtcaactgagccgactggccagcacaataaacacgctctgcacacgaacctgaagcgcggcatggaatcccgccacctgcaaatgatctcgttgggcggcgtgatcggcaccggcctgttcctgagctccggatataccattcagcaggcaggcccgatcggtacgattctggcgtacagcattggtgcgctcatcgtctatctggtcatgctcacgctcggcgagctctccgtggccatgccggtgaccggttccttccatgtgtatgccgaaaagttcatcggccccggcaccggtttcgtgatcgcgatccaatattggctcacttggacggtggctctcggctccgaattcaccgccgccggtctgctcatgcaacgatggtttccggacagccccacatgggtatggagcgcggcgtgcatcatcctcatctttaccttgaatgccctgtccgtccgattcttcgccgaggcggaattctggttcgcttcaattaaggtgttcgccatctgcgcgttcatcatcatcggtctactcgccatcttcggcattattcctatcgccggatatcagcatgcgccgatgttcggcaatctcgtcaaagatggcatctttcccaacggcttcgtgccggtgttcgcgacgattctgaccgtcaactttgcgttctccggcaccgagctcattggtgtgaccgccggcgagacgcgcgacccggaaaccgccgtgccgaaagccatccacaccacgctgtggcgtttggtgctgttcttcatcggctcgatcaccgtgatgtgcgcgctgattccgtggcgccaggccggcgtgggcgaaagcccgttcgtgctcgtgttcaacagcatcggcatcccctatgcgggcgacatcatgaatttcgtggtgctcacggccgtgctttccgcctcgaattccggcctgtacgcttccacgcgcatggtgtggtcgatgggtaacgagggcatgattccacgctggtttgccaagacgaaccgtcgcggtgtgccgatgctcgccttgtgcgccgcaatggccggcggcctgttggctctcctgtcttccgtgatcgccgcttcgaccgtgtatctggtgctggtggcgctgtccggcctgtccgccgtggtagtgtggattgccatcgcttactgccagattgtgttccgccgccgttggctggcatctggccattccgctgatgaactcaaataccgcacgcctggctacccttatgtttcctgggcggcgttcatcctgtgcaccgcatcgttcatattggtgattttcgatgtggagcaacggttctcgcttgtggctgagctcgtgttcatcgtggtctgttacggcatttacttcctgcaacaatggtggcggaaacgcagaaaagcgtctgacagcgaagacgatctatccatgccgtgggccaatcaacactgattgaacgattgcattttgttccgggttccagctccggttctttgcattgcggattgcatatatccgaacaatagatacaacacaataaaaagccatatttgattggaatgccgtccatccccattcataggtcaatagaaggccggcaaacagataataaaccgcgaggggcggtgacgttcggatgatgataaccgaatgtcaccgcccctcgcactcattgcgggatcaaagccacgaatcagttctccgcattctcgcggagagcctccttggcgtcgttcttgacctcggtggccttcttggcggcctcggctttggcgacatccgccttggctttggcctcgtcgagcgcatccccggccttgtccaccaggtcagaggccttgtcggtagccttgtctttgatatcgcgggccgtatcggcaactttgctgccggcctgtttggcaaaatccttcgcatcatcgatcaaactcatggttgctccttagtacatgtatgcatggaactactgaaattgctgacaatactgttcgattattcttgagttgtggtgagccttacttgcgacgttcccgcgcaaatatccaactcacgcataattatacatagcgtgagtgaatggaatccgtcaactcggcaaccgtcaaatgaatttcaacagctcatgcagactcgcaatctcaatggttctccacattcccgcagcaacggattgctccttgccgcgcgccgcctcttgactttctatgagcacgcgccaatcatggaatgtatggggattgcaatcaagcgcatatatgaggagccggcggcatcggacgggttccgcgtgctggtggaccgcctgtggccgcgcggcatgacaaaggagcgcgcggccttggacctgtggctgaaggccgtctccccttctccctcgctacgcaaatggttcggccatgaccccgcgaaattcgcggaattccaagcccggtatgttgccgaacttgacgccaataccgccgtcgaagacctgcgctgtatctgcgcggagcatcccgacgtgacgctgctgtatgcggccaaagacccgcaagtcaatcatgccttggtactgcgcgactatctcaatgagtcacttcaataatcggcagcacaagtaaatgttcaaaaacgacattcgcttctcgcggcgatttcgaattccaaagttcacaccaacggcttgcgtacatccagttcgcaagtgatgccagtctccttgcgagcccattccgccgcctgcaatgcggcgatgttccagagcgcgtgcggcacaccgccgagatctggatgggaaccccagaacgtgatgtcatcggagtatgcggtgatgaccgaatcctgcgtaaccggcataatcgtgcggtaaagccgatcggccagcgtggacacgaattcattggccgcggcaaacgtgtcgatgagatgctgctcggctgtcaccggcggaccaaccagctcccaggattcgacatccgtagcgctccattgcgcggcctcgccgtccacctcgcgctgcagtgaaacgaacagcctagcgaactcgtccgaggtcagacctgtaactcgacgacgggtcgagagttcaatcggagtcatcaacttctcctttccatgtatttatgcatcatatgctcttaagggtcaaattcgattcatgcggacgaacgaatccatctagtaaacgaaaagcatggctgcaatgcattacagaatcgactcaagatccccagatgaatgctttttcttgtaaatcggatagactggcgcgagaacagtgcgagaaagaggcgaggatgaccgagaaacaatcgcggaagcaaacggcaacatacgccaacctgcagaacgaccagtccggtcagccacagcaaagcaagccgcgcaagccgtcgctgcatgcacgctggaaaaccatgagccaagctatgggcatggaaatccgcgagcacaagagctcgttcgcggtctatgtggtgctgcgcctgctggtgctcgccatggccatactccaattcttcaacggcgattatgagaacgtatttctgtgcatccttacgttactgctgctgttggcaccggcatttatccaggtgcagttccgcatcgagctgccttcggtgctcgaagtcatcgtgctagtgtttgcgttctcggccgagattcttggtgagatcagctcgttttatgagatcttcccgttctgggacacagtgctacacacgatgaacggcttcctcgccgcggcgatcggcttctcattggtcgacctgctcaaccgatccgaccgggtgaagtttgagctttcgcctctgtatctggcgattgtctccttctgcttctccatgaccatcggcgtaatctgggagttcttcgaattcggcatggaccagctattcgggtttgacatgcagaaagacgccattgtgcattccatcagctcggtgatgctcgatcccacgcacaccaatcacgcgattcatatcagcgacatcacacaggttacagtcaacggccagaatctgaacctcggcggctatctcgatatcggcctgatcgacacgatggaagatctcatcgtcaacttcatcggcgcggtcgtgttctccgtgttcggcttcttgtatgtgaaaaaccgcggcaaaaaggactccatcatcagccggttcgtgccgcatcgcaagtccgccgaccgcgattatctgcgactggtgatcgatggcgggaaagcgactgacgtcgattcggctgatgaggccgcagccagtgccggtagtgccagtaccatctcagctgtcactgccaaaccttgagcacgctctgcggtactttcgacgcgtcaaaacggtagtgcccggtgaccgtcatgtgcttcttgaatgagaagtagtcattctcgcgctgcttctgggccatattgtgaatcacgtacggggtgccattcttgtcgcgtttgtccgagatgacgccgatatgcttgacgtgctggaagaccacgatgtcaccgccctgccattgcgcaacgtcggcggtgtccgtggtgagcgtctgcccgtatttcgtgaagaacacgtcaagcacgccggtgcggcggaaatcgatgttcgaatccggcttcggcgctacggcaacgtagctagccgggtcggcggcgatatctgtatcgaccatggccttcagatcgtaaccggcttcacgaaacgcacgccacaccgagtcggtgcaggcaccacgatcggctggcgggtagccgccctgataatagtcggagtcataggccgggtgattttcggcatccttacgggcaccggtaacaatatctgcatagtcgtccacaccgttgccgttgaaatcaaccgtgctggcggctttcgaatacttgcgattcgcctcatcagtcggcatgatatctgattccgatgcagccgaatccgctgaggttgggtccggtgttcccgccagcaaacccgccacctgtgttacgccagccgttaatgacatgggcagtactcgggccaggtgacgtgcagccagcacaccacctaaaacaagcatcacaatcactgcaacagcaagtatccgttcgaagcgtcggcgtgtgcttcgactgttttcatgccctgcttcagtcagatgatgtgccatatcggtctcccagcgtgagacttcccaatcgcttgtttcgatggcttacaccgtagtcgcatgacttatgaaatgcttggcccatacagtttttctgtatgggcttcccatgtccgtctatctcacagctcgcgcagctgggcggcaatctggatggattcgacgctggcttcggccttgttgcgggtctcctgccattcggtggcaggcacagagtcgagcacgatgccggcaccagcctgcacgctcgcctcatgatcgcacaggaacgcggtacgaatggcgatggccatatccatattgccagagaaatcgaagtagccgacggtaccgccgtagataccacgatcggccggttccagttcgtcgatgatttccaccgcgcgcggcttgggagctccggagagcgtgcctgcagggaacgcggacttgaacacgtcaaaggcggttagcgacgggtcgaccttaccggtgaccgtcgagcaaatatgcatgatgtggctgaaacgcttgatatccatgagctgtacgacttccacggactgtggcacgcacaccttgctcagatcgttgcgggacagatccacgagcatgatgtgctcgctgcgttccttcggatcggcaagcaactccttggcgaacttctcgtcctcctccggggtggcaccacgcgggcgagaaccggcaatcggaaaggtcatcgcgtggccattgtccaccttgataagggtttccgggctggagccgatgacattgaaatcacggccctgcgcgtcggtcaacgccatgaaatacatgtaggggctcgggttcagcgtacgcagcacacggtagacgtcgaacgggtcggcgggcgaatcgatgtcgagacgctgggagatgaccacctggaacacatcgccgtccacgatatgttgcttggcacgttcgacggcctgctcgtagtggcttttctcagtacggaaacgcaactcaggctgagcaaccgtttcgtccagaatattgacacgaaactcgtcaggagccggcgtggcagcgtcacgctgcatctggtcgagtcgggcgacggcttcgttgtaggcggcgtcggctcgggtcgacttgttgtccacgttgaccgcgttggcaatgagccataccgaaccggatatgtggtcgaccacggcgatatcggtggccagggcaagcacggtttccggctggccggtctcatccggggcctcggcgcgcaaggtcggttcccaatgacgaatcgcatcccaaccgactgtgccgaccagaccgctggtcaggttcggcagacccgccacatgcggggctttgagggccttcagagcggcgtgagcgacctcgatcacgtcaccttcggtgggcacgccgacagggactttgcccagccagtcggcctgaccattgttggaacgcagttgagccatcgagttgacgccaatgaagctgtatcggctccacgtgccgccatattccgcggattcgaggatgaatgtgccggaacggccgccagcaagacgctcgtagaagccgaccggggtgagcgaatcggcaagcaaacgacgcacgatgggaaccacacgatagccggcatcggcaagctcgtgaaactgttcgcggctgggccaggtggcaccccacttcaggtgttcgacgctgcattcgctcatgttcgctcctttacttgcgttgatgacgtttattctactgccgatgaagctcccccccagtcagctgcgctgacagctcgtcgcaagagaggacggcctccggctgattatattttgctcactgtcgttcgccttcgcctaaaaacgcctccgcgttttcttcacggttcagtctcagagaggggagccagagaaaggaaccaactctactgctcgaccggacgatgaccttcgaccacgggcagagggcctccttcgaggaagcaactgcgcttgccggtgtggcaggcggcaccgacctgatcgacctcaaccagcagtgcatcgccgtcgcagtccaaggacacacccttgacgtactgcacatggccggaggtgtcgcccttgcgccagtattcctgacgggaacgggaccagaaggtcacgcgcccggtggtgagcgtgcggcgcagagcctcatcgttcatgtagccgaccatcagcacctcgtgggtgtcgtactgctgcacgactgcggcgaccaaacctttggcatcgtgcttgaggcgtgcggcgatgcgggggtcgagttcagtggaattgtcgtatatagtgtctgtcatatttgtcttctttatgtggaccatcctcagtcacgctacgcgtgacagctcccgccagcaggagcaataaggtgtatgcgttttatcgaacggtgtaaccgtgcttcttgagttcggccttaacatcggcgatggtcagaattccgtaatggaacacggaagccgccagcacagcatccgcaccggcctcgatggcaggagggaaatcctcgaccttgccggcaccaccggaggcgataatcggaatcttgacttccttgcgcactgcgcgaatcatttcaagatcgaagccttctttggtgccgtcggcatccatcgaattcagcagaatctcgccagcgcccaactcttcagctcgtttgacccaccagattgcgtcgataccggtggatctgcggccacccatcgtggtgacctcgaagccggactgggtatgctgttcgccctgttcacggcgggcatcaacggacagtaccagcacctggttaccgaagcggtcggccacgcggctgatcaacgacggatcgttgatggcggcggtgttcactccgaccttgtccgcgccgcagcgcagcagcgaatcgacatcttcgggcgtgcgcacgccgccgcccacggtcatcggaataaacacctgctcggcagtacgggagaccacgtcgatcatcgtattgcggtgggaactggaggcggtcacatccaggaaggtgatttcatcggcaccctgacggtagtattcggcggccaattccaccggatcgccggcatccttgaggttttcgaaatgcacaccttttaccacacgaccggcgtcaacatccaggcatgggatgactcgtaccgccaacgacatgcttcactccctgtttggctttgctttacaacttttcagactacctaccgcccgttacatgggaagcagtcatttctggaatatgagaattaccactatatgcggtcggcaaagcaggcgcatagcagcccgaaccgtgagagaatagccagtggaacaatcccaatcgcgtgaaggagaccactatggctgtggagaacagcaaggttctgattatcgtcaacaaactggggcattgaggaaactgagctgacgcgcccgctgcgtgacctcaaggctgccggagctcaggtgacgcttgccgccatcacgctggacccatgcgagaccgtgcagcacgaccgttacgaaggcgagacgctgacgccggatgcgctgctgagcgatgtgcaggcctctgattatgacctgctggtggtgcccggcggcacttgcaatgtggatcgcattcgtgtcaataaggatgccattacgctggcgcaggagttcgcgcatgagggcaagccgattgccgcaatctgccatggcgcttggctacaggtcaatgctggactggttgccggcaagaccgcctccccttgccgttacaccgccgccgatatcaaaaacgccggcggtcattacgtcgacgagcagttgcacgtggatgatgccaacggcttcaagctcatcacgtcccgcaagcccgctgatttggactacttcgtggacgcaatcaaggatgcgctgaactaactaccgctccttggcagcgagctgaccgcaggcaccgtcgatgtcctggccgcgggtgtcacgcagagttgcggtgatgcccgcgcggtgcagaatttccaggaattgcttctcgtcttccggcttggaagccgtccactttgagccttcaatcgggttcagcggaatcggattgacgtgagcccaattatcaccgtaatggttgagccgcttggccagcagctgcgcatgctcggcctgatcgttgatgccacgcatgagtgcgtattcgatgctgacacggcgcttggaggcaagccagtaatcatgtgccgcgtccagcacctgagtggtgttgaaacgcttgttcatcggcaccagctcatcgcgcagctcgtcgctaggcgcatgcagggagaccgccaaacgcaccggaatgccttcggcagtaagcttcttgataccaggcaccacacccaccgtggatacggtgatattgcgtgcggaaatgccaaagccctccggcggcatagcggaaatctggcgcacggcggaaagtacggaattatagttgcccatcggctcgcccatgcccatgaacacgatattgcttaagcggccttcgcccccggccacttcaccatcgcgcatcattttggcggccacacgtacctgttcgacgatctcgccggtggacatgttgcgggtcaaacccagcttgccagtggcgcagaacgggcatcccatgccgcaaccgacctgcgaggaaatgcacagcgtggtacgggtcgggtaccgcataagtaccgattcgatcaaggagccgtcaaacagcttccataacgtcttgatagtgttgccctcatcggccacctgacgggtcacttcggtgatgagctgcgggaagaatgcagcagcggcctcatcacgcttcgcagcgggaaaatcggtgaattccgcggcattcacatcgaaatgcccgaaataatgattggccaactgcttgacgcggaatttaggcagtcccaattcggccgccttttcaatacgctgcgcgggagtcatatccacgaaatgcagcggcggcttgcctcgccgggcgtgatctttggaaagcacgtcgcggaaagctccagacgtaccaccaggagtgatgccggtctccggggtatcgatttcaggtatggtcataaccagtcgttccactctcaatcggtcacagtccggtgacccacagcaacgcacaggtgaacggcgcgctcatcagaatcgaatccacgcgatccatcacaccgccgtgccccttcaacagatggcccatgtccttgatgccgatatcacgcttgagcatggaggcgcacaaatcgccaaacgtgccaactgcaccaatcagaatgcccgctacaatcggcacccaccaacggctggtctgcaacgacgggtcataggtgaagatgaatacggcaaacgagccaatcatggcgaacagcatcgagccaatcagaccttcgacggacttcttcggcgaaatgcgcgggctgagcttgtgcttaccgagccatgcgccggcaaacagaccacccgtatcagacaatgcaggcatgaacaccagcatgatggcatgggcaataggatgatcgttgaacgtcagcggaatgatgatgcagctggccagcaacggaatgtagagcacggtcagcacggaaactgccacatggctcaaccgggagtgatgctgttcaccgccgtcgtgattgtatgaggattccagacgagcgctggcgtccgtgttggacagtttgccggcgaccgccagagaaagccggttgccaagcgtaagctttgcgcttgcggcgatggcaacaagaatgatggagacgatgacgctcagcgacatcgtgatgagatggtagggagaataatacgtggcaatcagggtgaaggaggagcagatccagagcataactacaggaatgtgcagtcctaccgtggcgaagtccacgcggagttcccagagtgccagaatcatgaacgcaacgaccaacagcacgaacacatcaatgctgagcaacaggcaagcgacgatcagtatgaccagtgccgcacccgtggcaattgcctgaggcatattgcgaccagtcttcttgttgatctgatcgagagcctcttcggcctcttcatggagttgttcgttgcgttccatagccattctccaggtctgatcgaatcagacctccatgatctccttctgcttggtgtccagcagagcctcaatctcatcggtaacggacttggtgaccttgtcgagatccttgagcagacgatcgccctcgtcctcgcccatgtcgccgtccttgacggacttatcgatggtttccttggtcttgcggcgaatgttgcgcacggccaccttgccgtcctcggccttggccttggcgagcttgacgtattccttgcggcgatcctcggtgagttccggcatggtcagacggatgacattgccgtcgcggttcgggctgacacccagatcggagttgcgaatggccttctccaccgcggcagcctgagaggcgtcaaacggggtgacggacagggtgcggggctcaggcacaccgatggaggccacggccttgatcggcgtcggagcaccgtagtaatcgaccacaatgccgttcagcagagccggattggcgcgaccggtacgaataccagcgaagttctctttggtgttttccacggtcttggccatctgttccttggcctgatcgatgagggacatgttcactccttgtgtttggggttcttctatgaacgcttgtattcgattgtaggcgctcgggactactcggccacgcgcgactcggcggtggagaccaatgtgccgatctcttcgccaatcagggcgcgggtcacgttgccggttccttcaagaccgaacacacggatgcgcttcttgttgtcgcgggccatggaaagcgcggatgcgtccataacggccagattgtcgaccagcgcacggttgtagctcagggtctcgaagcgcttggcttcaggatccttgcgcggatcggcggtgtatacgccgtcgacgccgttcttgcccatcagcacctcatcgcagtggatttccagagagcgctggatggagacggtatcagtggagaagtacggcatacctgcgccggcaccgaaaatcaccacacgccccttttcaagatggcgaatggccttcagtggaatgtacggctcagcgacctgacccatggtgatggcggtctgcacgcgggtggcctggccctcctgctcgaggaagtcctgcaacgccaggcagttcatgaccgtgccgagcatgcccatgtaatcgccacgggaacggtcgataccggcctgttgcagctcagcgccacggaagaagttgccgccgccgaccacgatggccacctgcacgccctgctgcacagcgggaacgatttcctcggcgatacgacgaatcacgtgggtgtcgatgccgaccttgcctccgccgaatgcctcgccggacagcttgagcagaactctgcgcggcttatcgctatcagtcatattgatgccttccttcaaccgaaaatgcctgaaaatatccgtagacaagcgtatcggcttacaacgacaccccttgcagcgacaccctcggtatacagacaaaaacgccacccggctgcaatcagccagatggcgttttgaaaattacgctagttgcgtgaaatgagcgctaggctcactcctcttcgcccttgccgacttcgacgcgagcgaaagcagtggcgttgccaccgacttccttgaacagggcgccgacggtcttggacggatccttgacgaacggctgctcgaggagcacgacttccttgaagaaagcgttgagacggccttcgacgatcttcggaatgatcttctccggcttgccttcggcctgggacttctcggtggccacgcgacgctcggactcgaccacatcggccggcacgtcctcgcgggtcagccacttggcacccatagcggagatctgcagggcggcttcgtgagccacggcggcaccggccttgtcggtggcgatcatggcgacgatgctcggcggcatctcagcggacttcttgtgagcgtagatctcgacgtgctcgccggaaatcttggcgaactggccgaccttgacatgctcaccgaacagagcggcggcctcttcgacagccagcttgacggtggtgtcgccagccttggcgccttccagctcctcagcggagttggcgtcggcgtccacggcgtagccgagcacttcgtcagcgaactcgacgaacttcggggtcttggccacgaagtcggtctcggagttcagctcgacggcgtaaccggtctcgccattggcggtctcgacgaccttggaggcgatggtgccttcctgagccttgcgaccctcacgcttgccagctgcggcgatgcccttggcgcggatgatctccttggcacgagcgacgtcgccttcagcctcggtgagagccttcttgacgtcgagcatgccggcgccggtgtcttcacgaacctgcttgatcagtgcggcggtaattgctgccattgattattctcctttaagaagatgttgcttaccgtgtgagcgatgggaggcgctgttaccagtgcttcccatcgcgtagtatcactcggccttgggggcctcagcggtctcctcagcagcggccggagcagcggcttcggcttcggcaggagcctcgttggtcaggagttccttctcccaagcggccatcggctgctcggcggtctcgccctcagccttggcggcctggccggaacgctccagcagaccctcggcgacggcgtcggccatcaggctggtgagcagctcgatgccgcgaatggcgtcgtcgttggccgggatcggatactcgacggtgtccggatcggcgttggtgtcgaccagggcgacaaccgggatgcccagcttgtgagcttcctcaacagccagggattccttggtgatgtcgaccacgaacatcgcggacggagtgcggttcatgttgcggataccgcccagctgcttgttgagcttgtccttctcgcgctcgagcaggaggagctccttcttggtcaggccggagccgtgcacgtcggagaagtccatctcctcaagttccttgagacggttgacgcgcttggaaacggtctggaagttggtcagcatgccgccgagccagcgctcggagacgtagggcatgttcacgcgggtggcctggttggcaatagcttcctgagcctgcttcttggtgccgacaaagagcacagtgccgttgtgggccacggtggtcttgatgaagtcgtacgccttgtcgatcatgtcgagcgacttgaacaggttgatgatgtggatgccgttgcgctgggtgaggatgaactgcttcatcttcgggttccaacgacgggtctggtggccgaagtgcaggccagccttcagcatctcgctcatagtgatctgagccatggtattactacctttcattgtcggttcttgcctggccatgcgcacctgcgtgcagctactcccccgttgtttcacgggcttgcagccgaccgacacaggccgtcgcgagcatgacgcgaatttgttgtgtgccggttgacaataatgggtggcttcgaacgccagcgactgcgctcgttgccgggtggcacacaaaattcgagaatagcatgacccgagaataatatgctcccgttggcgggagctgtcgaacggagcgagaccgagggtggttgaagtggaccaccctcagtcagcttcgctgacagctccctccagcgggagccaagaacggactacttctgatgttcgcgcatgtacttcatggcagcgcgacgctcttccttttcgaggcgatccaggtaaacgtgtccgtcaagatgatcgcattcatgttgaagcatacgacccataatgccagtgccctcgagcacgacttccttgccgtccaaatcaatgccacgcacacgggcatactcggccctgcgggtcttgtaccacagtcctggcacggacaagcatccctcgtcaccgtactgttcgccggatttctcctcgagtaccgggttcagcacgtagccaaccttcccatcgatgttgtatgagaaagccctcaaactgacgccaatctggttggcggacaggccagcacgtcccggatcgtccaccgtttctagcagatcatcaaccagtcggcgcacggcaggcgtgatttccttaatctcgtcgcagggggtgcgcaggacggggtcaggcacgaccctgatctcacgaatggccacttctcgttactcctcgttgttctcgccggctgactgatcaggcagctcatcggcagttgcctctgcggactcgccttcctcagcctcatcggcttcgttcttcgtcttcttgattttctccgacacgctagcaatcgaatcagacacgctggccttcatctgctcggaagatttcttgacggttgccaccgtgctgtcgatgatctttgccgtggtcggcaatggtttgttggaaggcttgggcgcatacaggtcttcttcgatgatggctgtgtaacgctgcagcaccttaggacgcaccaccttcatgctcggggtgagcgtgccatgttcctgattgaattcctcgtcgagaatcgcgaacttgcgcacggattcggcgcgggacacattggcattggcctgatcgatgtactgctgcacgaaagcgcgcaccgcatcgttgccgctggcctcggctagcgacatatcagggtcaaggccctgtccttccagccacgaatgcagcatctcagggtcaagctcaatcagtgcggaaacgaagggcttaccatcgccgaccaccaccgcatgagcgacgattggacaggtgtcgatgacatcttccataggtgccgggctgatgttcttgccgccggcggtaatgatgatgtctttcttacgaccggtgatgtatgtgaaaccacggccttcgatacgtccaagatcaccggttttgatccaaccgtcggcggtcattgcctgggcggtgagttccggctgcttgtaatagccgaggaacacgttcggaccggtgagctcgatttcgtcatcctcgccaagacgcacgcccataccgggaccgggcttgccgaccgatccgacctcgttgtcatcctcccagttgaccagcatcggagcggcggtttcggtcatgccgtatccctgaatgaatgtgatgtcgtccatgccattgaagaaatgagccagatccacgttcagcggagcaccaccgcaggccagccatttgagattcgggccaagggcggaacgaatcgacttgccgactgtggccataaagaaggaatgcgccatacggtcgatgaacgaatggccatgccccgactgctcgtccttgctccacttgacgaagtgcttgacggacagggcaaaaatatggccttgaacgcccgcgccggctttctgcgaggcggcgttgtacaccttctcgaacacacggggcacaccaagcaggtaggtgggtttgaagctgcgaatgtcggcgagcagatgcttggcatcgggaatgtatccgaccacaccgcagccgccgatgcatacatattggatgtaccgcgcgaagcagtgcgcaagcggcaggaagagcagcaggcgattgtcgtcatagagcatgccacgcagaatctcatagccgttgagcacaatatgcgtgtagttgcgattcgagagcatggctcccttgggcttgccggtggaaccggaggtgtagaccacagtcagcaaatcgtcggccttgatgcgcgcaatggcagcgtccaagatctcgtcggatacgttttgtccgaaatcggcaaccgcatcgagcccatcggccttgaagttgaacacatatttcaggcccggatgtgcagcgcgaatctgctccaacgtttgcgcatgctggaaaccaccggcaaaggctatgaccggatcgacctcttccacaatgccggcagtctgcttggcggaatcagtctcatacaccggaaccacaaccgctccgatagccgcacaggcaaaatcagccacgccccactcgtaacaggtgggcgagtagataagcaccatgctcccggccttcacgccgaggccgagcagtcccttggccacctcgcggacacggctgagcatttccgttgcagtggcgccacgccattgatgggtatcgtcatcctgccattcggcaatggtgtcatccggcgtgcgggctgcacgcttgaccagcagagagaacaccgtgtcctcgtcggtggtgacatacctaggttcttcaacatgttcacgcatacgctctactataggcgcgacctgtcctatgactacgccgtccgcatgaagtcatgtcagctttgagccgaaacgctaccccaaatcggcaaagacacacatccatctggaaccgatataccggaacttgagattcacccgcaaatcttcctggccaatggtcatgaataccaccatctccatcgtgtccgcgccggtgatcacgccatcaatcaaagtcggcactgtgggcagatagcagaatttggttttgatttccggatgagtcaccatatgggaatccagcaagtactgcatggttctcagacgttccagacaagggttggtcagcgctcggcgcaaatgatccacgctgagcttgcctcggatggcatcggcgcaattgcaggcgattcgacatgcagccatcgccatcgtatggcattcccgcgcactcatgctgctggcgaaggtaggttgtatgtggtacttgaccggacgatccgataactctacgacgatgaatccgtcataccccggcaaaggcccgcatcgacgcatatcaaaaaagcccgtatattccatggaatccccctcgatccccctcgaggcccaccaccatcggcaggcgcaggattacacaacatcatgaaaaggcgtgtcaagtcaagtaacttgacacgcctttctcacatgatggattagttcatggaacgcgaacgtcttgcgatcagcggctggaatacgggttgaccaccatgccgcaacgctggaagttcttcacatcgacatagccggtggaagccattgcacgcttcaacgcaccaatgaagttcgtcttgccatccgcttcatggctcggtccgaacaggacctgctccagagacccaaccgtgccgaccgtggtacgatagccacgcggcaacgtctgatgacgagcctccgcaccccagtgagtgcccttaccaggagcctcagtggcgcgcgccaacggagcgccaagcataaccgcatcagcaccaagagccagcgccttgatgaagctgccggagtcgcccatgccaccgtctgcgatgacctgtacgtagcggccgccagattcgtccatgtagtcacgacgggcttcggccacgtctgcaatggcggtggccatcggagcctgtacgccgatggtctggcgagtggcggaaactgcgccgccgccgaagccaacaagtacgccggccgcgccggtgcgcatcaggtgcaaggctgcagtgtagttggatgctccgccgacgatgacgggcacatcaaggtcatagatgaacttcttcaggttcaacggttcctgaccggaagacacatgctcagcagacaccacagtgccgcgaatcacaaacaaatctacgcctgcatcaaccacggtggagtagaactgctgggtgcgctgcggagaaagcgcgccggcaacggtaacgccagcgttacgaatctcgtgcagacgttgggtgatgagttccggcttaaccggctcggcgtaaatctgctgaatgcgagtggtggcttcttcggccggcagaccggcgatttcatccaacagcgaggtcgggtcctcgtaacgggtccacagcccttccaagtcgagtacgccaagcgcgcccatcttgcccatggcgctggcggtggccgggctggtcaccgaatccatgggagcgccaattaccggcacgtcgaactcgtaggcatcgatctgccaagaagtagagacatcttcggggtcgcgggtgcggcgagaggggacgatggccacatcatcgagtgcgtagccgagacggccctttttgcccaaaccgatttcaatttcctgagacatggcttccacactattgctcgggtgggacgctcatgtctcactttcccacagaccggacgattgtttcgcgccgttacaaacatgcgctaagactaaaaccatcttcacatcatctatcaggaggaagcatggccaaaatcaaggtcgaaggcaccgttgtcgaactcgacggcgacgagatgacccgcgtgatctggaaggacatcaaggatcgtctgattctgccgtacctcgacatgaacctcgactactacgatctgggtatcgagcaccgtgacgaaaccgatgatcaggtgaccatcgatgccgcccacgccattcagaagcatcatgtcggcgtcaagtgcgcgaccatcacccccgatgaggcacgagtcaaggaattcggcctcaaaaagatgtggaagtcccccaacggcaccatccgcaacattctgggcggcaccatcttccgcgagccgattgtgatgagcaacgtgccgcgtctggtgcccggctggaccaagccgatcgtcgtggcccgtcacgccttcggcgaccagtacaaggccaccgatttcaaggtaccgggcgccggccagcttaccgtgaccttcaccccggacgatggcagcgaaccgattcagcacgtggtgcacaactacggcgaagacggcggcgtggcccaggtacagtacaacgttaacgattccattcgcggctttgcccgcgcctgcttcaactacggtctgatgcgccactaccccgtgtacctgtccaccaaaaacacgattttgaaggcctacgacggccagttcaaggacatcttcgccgaagtgttcgagaccgagtacaaggacaagtacgaggccgccggcttgacctatgagcaccgtctgattgacgatatggtggccagctccctgaagtggcatggcggctacatctgggcctgcaagaactacgatggcgatgtgcagtccgattccgtggcacagggcttcggatcgctgggcctcatgacttccgtgctgatgaccccggacggccagaccgtcgaggccgaggccgcccacggtaccgtgactcgccattaccgccgttggctcaagggcgagaagacctccaccaacccgattgcctccatcttcgcttggaccggcggtctcaagcaccgtgccgacctggacaacactcccgaggtccgtcatttcgccgaaacgctggaaaaggtcatcgtcgacaccgttgaaggcggtcagatgaccaaggatctggccatgctcatcggcccggacgagccgtggctcgataccgaaggcttcatgaacgcgctggacgagaacctgcagaaggctctggccaagtaagtcgagcggtttttcgacacatcaaccctgattgttcccggatatgtggtgattcctccacatatccgggacttttttctactccgccctactagaatcgtgaaccagtgctactcgccccaaggaggttttgcccgcttatggtgttcacacgccgcccagccgccgttcttaccgccatcgttgccgcttgcgcgatggcaatatcgctgaccgcgtgcaccaccgacgcgaattcgcaggacacggcagacgatcagaccacggtcacttcgtccgccccgggagtcgtggccatgttcactccttccgacggcatcacgctgaaccagcagacaccgttgaacaagtgggcaaagctgacgccgaatctcaccaaggccctgacctccgccggattcaagaagggcgatatttcccacacgacttccgattccctggacaagcagagccgcgccatccaggactatgtagtcaatcatctttccggcagcaacaccaccgatgatgccggcatcgtcatctcccccgacaacatcaccctgctggtggcaccggtagtcgaggccgatgcctccacccgccagtacggggactatgtcagccaggagctcagcaccgccgacaccgctgaaggcagtgattccacggattcgtctgattcgtccaattcgtcagactcgtcggattcatctacgggttctgattccaccgatgattcgtcatccgacgcatccaaaacggccggcgattccaagaacgcggcccaagctgaagcggtggatcgactggtgtcgtcgctgaaactggctaaagagtccggcatgcatgtggtgctcatgggcaacagcatcaaaggctacaaaccagacaccttcgtcaggttctcggatgcgcaggccatcggcaagctgcaggccgaaaaaatcgtatccaagcttgaactcagcaaggccagcaaagacaatcccaagtacatcgaagtgctgatgccgtataccgctgtggatgagtcaggcgaggccagcgactccacctttgcccaagaagcgttccgcggcatctggcaggtgctgggcgcctactaccaaaaaggcgttgtggaaagtccttcaggtacattgaacggcaactccaccgaggatgattggcaatccgtggcctacgacgcgtccaaggaaggatccaccgcaaaggtactcgacgcgcgcttggccaaagccgacgaacatgcctctcccacccgcattgacggcatcatcgccatgaatgactacatcgcctcggaagtcgtcacggaactggacgatcttggatataccggatccgctgctgatatcaatcctcaaatcactatttccggcatagtcggcaacatcaccggcaagaaggatctgagccgcagcgatgttcctgaccccatcaagtctcccgaaaaagacgattcggccgattccaccgattccgcagatacccaggacgactccaccgccacggataaaaccgataagaccaaggactcgcaatggcctctggttaccggatatggtgcctacgtctcgaatatcccgtctatcgtgaacggcaaacaatggatgaccggcatagaggatcgccagaccttggccgagaacattgctgaggcatgcgcactgctcaacaagggccaaacattgacttccatgtcttccgtgcggaataccgaagtgggcggtaagaaagaggttcccaccatcagcgggccgcttttggccgtcagcgccagcaatctcaaggtcacattgatcgatccgggatatatctctttggccgatgccggcttgtaaaccgagcctgaatcataacggtttcaacacgatcttctgattccccgcataccgctgtggatccagataatcatcttccccgcgcttgaggccccagtgcaggcactgccctgtgcaatggtccgacgcaccaccaaccgtaccgatgaactgcccctgcgtaaccgctgcgccaaccgtcagcgtcgtggtcgccggctcgaacgtcgagatcacaccattgctatggcgcatgctgaccacgtccttctccgccactttcccagcaaaacgtattattcccgcctggggtgccacaatcacggttccggcctgtgccgtgagatctatcccgcgatgtccggacaaccaccgcttggccggtttctcgaactcccgttcaatccgcgggtcaagcaccggccatccgcaaagggcctcgcattgccgatccgactgcggttgtgtcgcataggcatgctccgcattcccattcggcatcgcaattccaagacctaacggcagtaacagccccagaatgagagctactgcacacatggcacgtttctgttcctgtgcctttcgatgctctctgcgacgccatatagacgcttttctggccgcctcacggcgtttgtttgcatgatatgcacgcatgagttccccattccccctgttcaggccggtttccgctccggttcttccacagtgaagcggtgacagaggaatgtccagctgaatcgggatatgtggttccagcttgccagttatccacaacggcgtgttgcttacaattcggcaagatgattcaaatattgactaccgagccgaaaatcacttgattgaacatagtccaaatacaacgaaaccccttgatctccaaggggtttcaggcagctcctgcgactgggcttgaaccagtgaccgtccgattaacagtcggatgctctgccaactgagctacgcaggaatatttagttttcccggccagtctcctgaccaggtgagctcctgcgactgggcttgaaccagtgaccgtccgatatacggttctggctcgcagccgtagggctttttgcaacaggagtagacaatacaccagccttgctgttccttcaaatcggcgtgtcatcgcgcatgttcgccttgcagctggttttccgaagagcatcggccagaaacgcgcaatagtattccttgggaagtgatgaagaagtcacttcccttttctatgcgcttaaggagccccatgaggtattggaacgacaacaggaagagctgcgaacacgtcgagccacgggaggattggaaagaatccatcgagaaatggatcgactggatggacgccatcggacgcacgaacgacaccctgcgcacccgctggtaccagatcgttcgattctccaaagccgtcgataaaagcatcaccgacgtgaccgaagacgacctcatattctacctagccggcatgggaaccgaaggcagacgcggagtatgcagctgcgtcaaggtcttctaccaatggagcatgaagcgagggctcgcccgccgcaatccggcggacgaagtgcccaccgtgcccatgacccttccgtccggctgcatctgtcccgaggagaacatcgaacaaggactcgcatcacccgacgagaacgcgcggctggccgtcatgctgggcgcgttctgcggcctgcgccgcatcgaaatgaccagaatcaacctgaagaccgatctggaggagaacgccgagggcatggtgctccacgtccacggcaagggcaacaaggagcggatgcttcccgtgccggcaaagctcgcttcggcattgcggaaacgcaccggcgtatggctgttccccggagacgtgcagggacactgcggcgtcgattacgtggcgaagaggatcaagacggcaaccggatacccgtcgcacagcctgcgccgtaggttcgccacatgcgtctactacaggaacggctgcaacatcgtgcttgtcagccgtatgctggggcacgccaacatcgccaccaccatgcgttacatcggcctcgtgcaggacgaaatgcgcaacgccgtggaatccaccacccgcaccgacatgagactgaccatgcccatgaaccaggtcgtcggaacagccggcagcgtcgccacctattcccttagcaccgcgaggatcggatgaacaaacggtatacgccaacatgcttctttgcgcatattggcgtataccaacaccgctcaccgagtgttcccgagactggaaagcggcaacgcggctatgtctatccccagcgcatcggctgcggagaacaccgcttcaatcggggcttcgccccgctggagcagagcatcggcaagccggggatcgataccggcctgggaggcaaggtcgtcggcgttccaggaatggttcgcggtctcttcacggaaggcggctgcgatatccgattcggtgcgggcgaaaagagtccggcgttcacgcggcgcttggaaacggctgaggtaacgcgcgtactccaattgcgcctttgtcggctcaggcaagttatagtccagattcgacatcgcagacctccttagcgttcagcgggttggactggagtcgttcgacgcaccgaaaatagggaatccgggaaccgcatcggccgacgatggagtgcctggagtgccgtacaacgtcccgatctgttcgatcgcccatgcgctccaacgtggggattcgaccgtggatgtcatcaggccggcggggaggaaccggcgcatctcgtcggcgaaggcatccgagccgatcacatcggcgacccccgccacgcgatcagcacggtctgcccaaagtccttcttcgccgtaatcagatgatttcaattccgcaagctccatcgcccgtcgggaatcgacgtcgcctctcgacgccaaccagcacatgtcccacaggtcgcgtcgccgcaggtgcgatgcgcaggcataggagagcagcttgtcggcaagaatctcggtggggctttccacatcgaggatgatctgacccgacaaggccgggaacatcggatagttgaccaaggcgggacgatgctgcggctcgtacgcgggaatcgatgccacctccagcttgattgtctggctcggcagatccttgcgctgaccggccgtgcgaatcgctatacgccatctgcgcgtcagcccatcggcgtcgggtctcggctccttgacccggaccgtcacatcatcgcccatccccgagagcgaatcggagatgcaggagccaagccctttaagggtgtccatgtcgaacgaggtgccgccggcaaaatcaaggtcctcgctgtaccttggggacccgtggcacaggcgcagactcgtgccgccctggaacaccagcgaggagaagaaaccctcgcgcatcatggcatccaggattcgataatgcagaagttccttctcgaccacgggaagcagattgcccatgccctcgcccccggccaagacgatcccggccgccatagccttgtagtcataggtgccgtcagctccagtcatcatcgtcctccaattcgtccatgtccaccagatcgaggttgcgtccgacggccttcaggtcacgatacgcccactgtttcgacgcgagcggcgtcagtccgtcatcgcgggcgatcaggttcggcaggatgcggtcccagctgagcttgcagtgcgtgaactcgatcaccccatacggggtatggaactcgccctcacggcccgtggtcatgaacgtgaccctatccaccggaatctggctgatcacgttccagcgcgacagagcgctttcgaggctttcccacaccagctcgccggaacgcaaccgctttgcgacctgatgaagtgtcccctcgccgagatgggaggaatacgcgaacacgtagacgccacgggcggcacggaccaacgccttcgccgataccaggctggacagggttcggttcagtttctgcccctgctcacccagcacgacggccagttcgttcttgcaatacacgtagcacgagtacttggcatccatctcgcgcagctgatcaatcgcctcgctcctcttcatgcatataagtgtacatgaatatatgtaaaaacgcatattcatgtacacctatcacaatcctgaagcgttccaatcagagggaacgccctcgtgccggaccgtcttcgagaccaatcccgtcgatggcgttttccgagaaagggttctctcttaatctgccgacgatttccgctacggcgcgctcttcctgatcaacgcattggacaagctgggaaatgaacggcttgggatcgccgtcaacctgccatgcttccagacttttcccatagctgcggccggcatcatgtttgattgctacgggccggtagccggcagccatgagcatgagattcagaatctgtcgcccggttcgcccgttgccgtccgtgaatggatggatgttctcgaacatcgcgtggaatccggcagctttgaggatcgggtggtctttggaaccgttcaccgcgtccacgagcgcttccatgtcctcgtagatttcaagtgggtcggcggtcttcactcgggtggcggtgatccttgcctggtagccgtaggggcggaaccgacccctgagcgcgggctgcatgtccaatgcggtgacttcatgcagcttttggatcatctcgacactcagcgtccgctcctcttcagcgaatcgttccgcataggccatgccatccgcaacgccacgggcggcgaagatgtatcttgccggcgagtcggtcggcacgaactcgccctccaacaccagttcggtgtcctcaagcgtcagcgtggatccctcgatcgcgttggagttgtagacatagcgggccatccattccttacggtaatcctcaagcgctgactgctccaccccatccaaaggaaacatctgcctgaaccgttctcgggcagcatcggaacgacgaagcaagtcggacacctccgcgtcccgctccagagagtccaagagaggaggaaggtttcggattttctcagtcagcgctggattcggcatatcggctccttaatcgatgcttccataagtctacaagcgcaggcgcgtcacatggacagtcctggcgtatctctacctccacactgccgtcgtggtggtggccgcgcatcttcaggattccgttctcgtcccagatgtggtcgatctcgcagtccttgaacggggaatcatcgccgttcatcagatcatcgaaggtctcgaacgaggatatgcccgtgcgttcgccgtcccatcggcctatgcttccgaacgcgatcagcgggttgcctcccatcgggttcctgtacgaggagagcgccgactgggatccattgaagaaatcacgcagagcgccggtctccatcctgtaatcggtttgacgggattcgtccgcgaaggcatcgaacgtgatcgacgtgccgctctcctcgtacagccgccacaggctgtcggcgcgggtgctgtgttcacggtaatacgggtccccgtgtcgcgtgtcgtagtcggcggcgttgtagatgggcctcttgaggggttccgggtcgcgtatctcgtccgtccaattcatgtccatcatgtgctccttcgctttatcgtccgtgtgtcgtttccatgccgtcatccaacgcgaggtcgagccctgcggtctcaggagacgtttcctgtgggtcggcccagccgacggcgaggtccagcgcgccgcgcaacgcctggccggaaagccggtacgtccaggaatcgtttgcctcgtaagggaaggattcgccggacacgatgccgcgctcgtcatgcaggctcacgtcgaacgttccgggtttggccgtgattagcgcatgacgggcggaaccgggagccgagacctccagcgcctttctgccgtcgggagacccggtggcggtgaatttgatatcggggtggtgcgcgaggctgtaggaagcgttggactcacacgccagcgggaccgtatctcccagcccgctgtctgcggccagctgctgtgggctgtaatccatgccctgcgtgtagtcgatgggctgcgcgtcggtgtagaagcatccgccgccatcgtccgcgtcgatcaggtcgcccacgagccggtccaggcgtgcggggtcgtcccatgcgctcacgagtctggcgggttcggcctggttcttccatgccatgtagcggtcgcgttggtcgccgcagatgccgtcgaatgattcctgggagatgaacgtgccgccgtccaattggtagcattccccgtccgggtccaacgcacgctccttgaactccttttcggtggcggcgtacaggcgcttgtcgagcggttccatggccgcgtcgatgcccgccatcatctcgtccacgtgttgccgcatgtcgggctggctcgttttccaccatgcctgcaagtcggcgagcacgtcggcggcgttctcccgttcgcacacgtcgagcaggtcatcgtcgtaattttccaccgtccaggagtagaaatcccagtcactcgaaccggtcaggcgttcgatgcccttcatgcggtggaagtccatcaacccgccgccgtgctcgcgcacgatgcccgccaacggcagatcggcctcgtccatcaggcctttccagtattcggggacattcccgttctccatgtcgttctcctttccgaacgccttttcgatcacgagcgggtctcgtgggtcaacagtgcggtcgatccgcagtatctcgggcatgaccgcctcgctttcacggccgatgacgaacgtgccgataccggccttgacgcgatgctcgggaagccttcccgaaccgtcgcacatcaccgccggccggaacagcgaatccccgtaggcgagcgtcaccgtgtcgcccggcctggcgagaacccgttcgacggccatgcgtgagaggccgtgcgcgtcgagacggccggaacgccaatcgttggcctcggctgctgtcagggtgaaggaaacggaacgcccttcctgggccgaggtcacgtcgagcctgactggctgcatggcctcgaaaccgatccagatgccttccggcgtcctgtccggggctttcacgtcaatgtccgtgaacccgtattcggtcagcacgtccgtgaccctgatcctgagcgcgttgtcgggaggcagatcagggcgttcattgggaatcgggagcgaggacgcctcgaaccacacgtcctcgctcggatcggtgtcgaagccgccgtccgcgtcggaatacgccatgtggacgccgaactccaattccttggcatcgacggaagagaccagaatcgcgttccccagcacgagatcgcgcgcgttcctgcgcaggatggattgcatgtcgggcttggcgggattcccggccgcgagcaggtcgcggttcacaccctccatgtcaaaaggcgtcaaggccatctcgctcgccctttctcacttggaaaggccggaaccggccgtatcggtcatattcagcgggtccgaggggtcgcacgcctgcgcgcgttccgcgaacgaggtgacggcaccgggcagcacatatcccagatcaaggtcgatcgggctcacgccgtcgtcttcgccgacggacgctgcgggcattgcgcccatggtctcgcgcagcacgtccacggcgtcgccagtagcggcgcgcgcgtcgatgatccggtgcatcgtgtcctcaagcgcggcatggatatcggtggaaccctcctccacgatgcactggtatgagggggctccccagttcgtgccggtgccggaaatcgtgtagtccgcgatgcgttcgcccggctggacgagcgaggcgaggtcgaacgcggacggcgaaccggtcttcgcgtcgaaatcatccagccattcgacctcctcggcgatctcctcgcgcgagtaccgtccgtcgatatcgctcggccagtccgcgtcctccagatagccgttgtcgccaagcgacacatcgccgtcgagcttgaggtcccggccgtacatctccatatcgatcagatagccgagccccgtatcgaacatggaccacacggcatccgatgcccacccctggttcacggcggtccaggcatacttcgcctccttcgattcggccgaggacggcgcatcataagagtgataggggatctcgtccgagttcaacgcgaggttcgcgtactgcaacggggtgcgcgggaccgcgtcaagatcgtcgcggaccgcccgcaccttctcgtacacgtccgggtcgtcgtcctcgcgcgcctcgaacgcgcggcacatgaggttcaggtccgtcagcgactcgtattcgacgggattcgccacggtggcgagcagtccttccccgccctcgtagtcgtggatcgcgtactcctcgtaccggccgcccaatcccacctcggtcttcagggtgtcctgcaagcgttcggcgggcatgggcagcgtgatccacgcgccctgcaacacgccctccacgtatttgcccaggttggcgacgtacacgctgatctggtagtccttcaatccgtccatgatgatgctccttcgctcgggtcttttatcgtgtggctgcggccgaggcagacgtatcggcaatgctcaacgggtcggccgggttcgcgggatcgtaggtttcggacgtttcggcctcctcgtcttcgtctttgcgggcgagccggccgtcgtccaccatcgcgtcgatgatctcccatccctcctcgatgctgcggtcccgcaattccctggccgagatcatgtcgcgcatcgcgtccatgttctcgttgttgtcgggccagtcatggtctttcagccagtgccgaaggtcctcctccgtccagcggatctccgcaatcgtttcgttgccttgcccggcgttgctttgaccgggatgaagcaacgcctcagatcggagaccgaaatacgctttgtcttcctggaggccggacaggaagccggagggcgtgaacccgttgcgtgccgcgaactcgcgggaccagcattcgtcgaactcctcgtcggggtcgaagtcgaggagcccgtccgccatggcgcgcctcagccccttctcgtccgcctcggccggcaccgtgaccgtgaccgtggcgtggttgggggcctccagcgtcatgtacagttcgctgtggccggcgtcgcgttggatgaagcattccccgttgccccagtcgagctcgtgctgctcgatcagctccttcgccttgtcggtcagggcccgttcctgggacgtgtattcatcgggttccatcagcatgatgcgtccttccttcccttggatgatcggtgccgcgccgtccggcgggcatggctccgatcatcagcccatacgggcggtcgcgcggggcatggcgtctacggggcagatgattccgccgagatttgtgctcggtccctttcgtgtcccgctccttagtaccagttgtgggcgagccagaacgtcttggcggcgctggggctgccgtaccggccggcgatgtagttcaatccccatttgatctgggtggcggcgttgtccttccagtcgtctcctgcggaggcgagtttcgacgcgggcaacgcctggggtatgccgtacgcgccgctgctcgggttggtggcattccactgccatcccgattccttgttccacagccatacgagcgcgtcatagtcgccgtctccccagtccttgtacgaggcgatcatcttccgggcgatggcccgggcctgttccggcgtggcgtgggtgccgtcgccgtcgtagtccaccaccacgtccgtggagcccgagtcggaactggagcacgtccatgccgcctccaccggatccgaagaggaggacgagtcggacgatgacgacgaatcggacgattcggaaccggatgacgtggaatccgtgccggcggaaccattggtggacacactgccgttgggcaggatgtagaccgcgccgacgttgatcctgtgcgtgcggtggttgacgatgcccaggccgccgcgcccgttcatctcgctgatggtcacggtgccggccgtccggtcgaccgcctcgacgacggcgacgtggccgtacagggtgtccgcgtcggccacgccgggcgggtagctgacgatgctgccggccacgggatcggtgcgggtggtcttccatccggcggcggtggcgctggcggcccagtcgccgccgttgccccagtaggagcccacgtccaatccgtttttatggcctctcatgcacgcccaccatgtgcattgcccgtccggataggcctggcacacgttgtcgggcccgtcggatccgttgaaccacgccttggtctgcgcgatggtcatgccgtcacgcacctcgccggtcgtgacgcttcccgtgacgcctcccgacgatccgttggagccgccgtccttgcagccgccgaggaccgcgagcacggtcaacggcgtgcatccgccgagcagggacagcaggcacgccgagagcatggccgcgaggatccgatggcggctggcccggctcattgcgtgttcctcagcgaccagaagggcttctgcccgccgaccacgacctccacggtccggcagggatgctggaccgtgccgtatccggtggcggagatcaccgtgtacgcctcgtcgccggccttcacctgatcggggtcgagctcgttggcatccttgtccagcaatgacgcgtcgagcgcggccgggcagtagacggtgacgtgccagttgccgtcgtccatcggcaagagcacggtgttgtacgcctggctgacggtctgctgcggatccgtcgtggatgacggtccgccgccttccgggatcgggaagctggtttccttcgtcgtccagaacggctgggactggatggcatccgtatccgagccctcccatttgccgtcggaggtgcaggtgtaggcgtagttgacgtacttgtcatcgtattggcccgagcatacggatccggcgtggaagcggcgctgggtccaccaccagcgcggcgcgtcggagaccggatggctttccccggcaccgtcgtcgccgagcagcgcgaacacgttgttgcgccattcgtcgtcgctgccgtttggatcgagcagcgcgtccaccgtttccaatgcggtgtcgatcgggccggaaccattgtgcagcgtgatgccgtccgcgttttcggagagcgtgcgggtgccgtccttgtgggtgtcaacggggaacgcggtggtgcgctgagaccagtcgccgggaaccgggattcccgccgcctccaggccggcgtaccgtcgcgggcccgaatccgttttccttttgcccgtggactcctgtttcgcgtccgtcgcggaaccgtggtcgtcgccggccgttgacggctggtggttggcgacgatgacgcccagcgagcacacgaggagcgcggcgacgaacaggcacaggacgcgcagcggtttcggcagcggacgcggttccggccggttcacgattcaccgccttcccaacggttcggctcacccggcatgccgccttgcgtgttttcttccatggccggatgctcccgctcggggttcacggttcccggatccgcgttttcgggcgacccgtcttccgccgacccgtcttccgtccccgtccaccgcgcgtctatgaggtcgtccgccgttttcagttcggcgctggtgtttcccgcgtccttcgccttcctgcgcagcagggtggccttctcgcgggcctcttccagacgttcctccaatgatttgatgttgacgcgcgccgccacgtactcgtccatcgcatcctgtttcgtcttctggctgtcgcgcaccgccttgaggatgctgcgtttcatgtcgcgcatggtgttctggttgttcgccacgacgatcttcctttcgctcgtttttccgtcaaggcgagtctgccttcccgtcgcgcgttccacggggcatggcgtctacattccccatggcggaaggcggggcgtgtagacgccgtgccccgtggccggccgttttgcggccgagaatcggaagcgtcgttccaatcaggtgaaaggaaaatcaatggaatcgtttctctctatgctcgccggctggttcatgggcctgtggacgtggctggtcgagctcaacgggatgctccaggtggtgctcgtgctgttgtgcgtggtcgcctcgggcgtgtgcgcgatcatcggcaaacgcatgggcagcccgatgatcgtggaatccggcggacagacctggagccgcacgctggtgacggccatcgcgtggatcgccggcgtcatcctcatgctgatcgcggtgctggccatcgccgccgtgttcgcgccgctgctcggcttcgccgcctgaccttggcgacgcctttccatccagggccggccgggaagggattcccgcgccggtcctcgcatgtcggacaagaatcaaggaatcccaaaaaacggaaggaacgcgaacgaagaatgagactcgtcatcgcggaaaagaaatcggtcgccacggccatcgcgcaggcgttgtgcgccgcgcccgtccaaagggacggatgctatgagtgcggccagctgctcgtgacatgggcgcagggccacctgatcgaccttgccatgcccgaggactacaaggacagggattggaggaaatggagtctggacacgctgcctgtggacccgtccggccattggcggtggaagatcagcgaggagcgcggtgccggctcccgctaccggcagatcgtgcggctgatccgccgaacggatgtggattgcctcgtcaacgcctgcgaccccgaccgcgagggcgaggccatcttccgccgcatcgcggacatggaaggctctcacaagccggaactgcgcctgtgggtggcgagcctggaggcggaggccatccaggccgcgtggcgggcgatgaaacccgaatccgaataccaagggctcgcatggtcggcggagatcaggtcgaaggcggactggctgatcggcatgaacgcgagccgcgcgtactcgctgctctacaacgcacggttcagcgtgggccgcgtgcagacgccgacgctcgccatgatcgcggaacgcgaccggcagatcaggaaccacaaaccggtgccgttctggaccgtgatcgcggacatgggcggatggcggctctccagcgaacggatcgacagcaaggatgcggcgatgctgctgtgcggccaggccgaacacggccgcttccgcatcatgtccgtgaaccggaggcgggtgaacgaccggccgccccgcctgtatgacctgaccggattgcagaaggacatgagccgcatgtacggcatgaccgccgcgcgcacgctcgcggcgttgcagcacctctacgaactcaaactcgccacctatccgcgcaccgacagccggtacatcacgcatgacgacctcgaaacgctcacggcgctcctcgaatccggccgtctcgcccaagggttcgtcacccgcgagggcatacccggacacccgcgcccggagctggccgtcaatgacgcgaaggtggccggccacaccgcgatcctgccgaccatgcaattggacgccgggaagctggaaggcctggacgatgacgagcgcaaggtgatgacacgcatcgtgcgccgcatgtgggaggccgtgggcgacgaccatgtgcacatcgtcaccgaggtgaaggcccggctttccgacgacaccgacagggagttctccagtcgttccgacgagaccgtatccgcaggatggaaggccgtcgaaaccggccacgggcccgaaccggaagacgaggaaaccgcagacccggcgggaggaaggaacgtgatcccatcgaacctcatggaaggcggcgtcattcgcccggtcgggaaggtcacggtcgaggaaggcgagacccggccgcccaaaccgttcaccgaggccacgctgctggccgcgatggagcacgcgagccggtgcgtggaggacaaaaacctcaaggcggcactcgatgacgacgaatcacattccggcggcatcggcacacccgccacccgcgcggacaccatcgaaaagctcgtgcgctccaaactcgtggaacgcaagggccggcaattgcacgccaccacggaaggcgaacgcctcaccgacgtggtggagccacgactgaaggacgtgctgctcaccgcgcggatggaacaggcgctctccgacgtggaacacggcaaacgggacccggccgacgtgatggacatgttccaccgggaggcattgcgaatccccgccgacgcgaccgcgaacctcaaggccgatgccgtcacacgaaccgcgaacaccgacgcgcaggattggggcgactgcccgcgctgcggccagccggtgaggaaaaccggccggatgtggcaatgctccacgaacagaagcgagaagaccaaggacggcaagtggatcgccgtcgagggatgcggctggaagatgtacgcgagcctcgcgggcaagaccatcaccgaccagaccgcacgcaggctcctcgcgggacagaccgtcacgctgaagggcttcacatccaaatccgggaagaagttcgacgcggccatccgcatcgacaagttacgcggcacggcgttcgacttcgaccgctgaccaaaacgccaaccatccgtgcccgacgcgccatgccgcgccgggcacggcaacgaccaaggagacgatgaaaccatgcgacgatacagccacgccttccgggtcctcatggaccgggagctgttcaatctgcttgccgaggcctccgccaagacgggcatacccaaatcccgtttcgtgagatacgccatccagccgttcagctacacggaactcgcccccggcaccaccgattggaacgacgtgtaccgcaccgaccccgaccccgaacatccgctgaagcggggacgccagctcaatgtcatgctcaccggcgacgaatacgagatgctgtgccgggccgcgttcaagctgggcatcgcgcgcagcgcctgggtgcgggaacgggtgtacgcgctcctctgccgctcctatgcggacgagctctccccgctcacggacgcgagcatccgcgacaacgcgacgatgctgctcaaggagctcaagacgaaggatgcgggaagatgacattccaaaaaaaggaagagccccttcccattcgtggaagaaggcatcaccccgaacgatcatccaccctcatgcgttttcctatgcgctcgtatggatatgtccatggacacccacatggacacgtccatagacatccacatggatatgtccatggacatccacatggagatgtccatggacatccacatggagatgcccatcaaatcgaaggtaagcaagctagacggttcatgtacatgaaccgaacgcagcacctcccgcgcccgtcggcgcaggagcaacaacccgagtgccgaaggccgatggaggaggagaaagaataatgcgtaaaagaagcagcaaaggcggcggcgcgcagcgctccatccaagtgcatctcatggtgaacgaagaggaagccgcgatgatccgcgccgccgcgaggaaacggaaccagacggtatccctcaccatcatcgaagcggtaaagctgttggagggaagcctgtacgtcgaggaggaggaacatgattcgcccaccgtccaggcgctcagggagatcgaataccagctgcgccgcatcggccgcaacgtcaaccagatcgcgcacaacgcgaacagggagatgaacgcgaccatcgaggacgaggcatcggcgtcctacgccgtccggcaatgccgggagctgatagaccatctcgatgccgtcatcgggcagtccgggggagtgcctgatgacgcgaaccggtcagaggagggtcaggctttgcggacggtccgcttgtagtccttggatttcttcgatgaaccgggagaacgtcatggtttctccctggatcaggtcgtcataggattccttgactaccttgggcatgaccaggtggatgtgcagttcatcgagttgggcgagcttgggatgggtcacgtcgccgggagtcagggtgaacaggtgtttgtccctgatccggttggcttcgtcggcgacctggcggaaacgatccttgatggaggttttcgaggcgagcatacgcagctgttcctcggggaacgccggatcctcgtaggcggcttgcgagggaaacaggaaatcgggtttcttcccgttttccgtcttggcctgcgcctcgtattcgatgccgcgcgcgtcgaggatgtgggcgatgtggatttcgaggaccttgcctgcgcggctcatgcgccggttgcgcacggaggtgtagaacgaagtgaacgagtcaacgtcgatgacgccatccgatacgaatggcgcggcatcatagtcgtgttggatgaccgcccgctcatagagtttgaacagcaggtagctgcggtcgtagtattcgatcaccacgtcgtcagggtcatcgtgcgtggggtccacgtccgtcaaggaggattgggagaaggccgcgaactcctcgttgctggggaacctgtatccccatctgccgatcatctcggggagatacgtgtcatcccgcacttcgacgttgatgccgagagcttcgaagatctgcgcgccgaaggcgtccagctcacgttccgtgttgtcgtggaagcggaacgcgccctcctgttcgtcgtcgatgccgaagagccatttggcttgggcttcgtccgtgctgtcatgctgcgcgatgatgatcagcaggcgattgtccctgagcataccgaagcacatgaggtcgccggggcgggccatgcggattggctcgcagtccttgtagtagagacgccattcggcgctgcggttcggtttgttgcgccgcgcgtcgtaccatgtggtttcgaggtcggcgaccgccggtgcgtcatcgtcgctcaggtacatgagcgcggtgggtatgccgtgcccttgggatgctctacgatcctcgccggtgccgagcagtcttctgagcgcgtcgttgccgccgaactcgtgctggttgctgctgttggcgtcgatatcgacggccgacagtttcttggccgcgaccgggccgatgtagtcgccgattcttccgtaatcgctcataatccatgagcatagaccaatcggacaggaaacgcctcgggcgaatcagtcggacaggtagggtttcatcgcctcgcctatggctcggatgaccggcactgcgaccgagttgccgaactgccggtatgcctgcgtgtctgataccgggatactgaacgaatccgggtagcccatcagtcgcgcgcattcgcgcggggttagccttcgagggttctttccctcgccgcgtgagaccagtatctcgctgccgtcctttccgtaccgcgcgctcaacgtgcgcgtgtggtcggtggcggcatcgaccatgccatatccgaaaccgttgcctgcggcctcgtgcttcttcttgtagttctggaggtacgtccacagcttgtcgctcagaacatacttgtcgggaacctgggaggcgggcaggaggatgctgccgacgttgccgtgcgcgatgggcttcacgtcatcgaacgtgaacccgttctcctcgcggaagcccacgatgtacgtgcgttccctgtgctgggggacgaagcccgccgcgtcgatcagcttgtaggtgacgtggtatccaaggtcttcggtcagcacggaatatatcgtcttgaacgtgcgcccacggtcgtgcgagagcaggttcttcacgttctccaggaggaacgccttcggctgcttcgccttgatgattctcgccacgtcgaagaacagtgtgccttgggtcttgtcctcgaagccggtgggacggcccatgctctgtttcttggagacgccggcgatggagaacggctggcacgggaatcccgcgagcagcaggtcgatgtcgggaacgtcatgctcgtcgaccttggtgatgtcgccggccacgggattctcgtcgtgccagttcgcctcataggtctgcacgctgtacttgttccactcggacgaatacaccacgtgcgcggcatcgcccagcgcctgcaccattcccatgcggatgccgccgatgccggcgaacaaatccgctatcctgatctcactcatacggttcctccgattcccgagaaacccaggatagcacatgagaagggcgcggcccgacaccccgcgaaatcatcgcgtaaataatcccgtggcgttcgggagcaaacttcccccggacgccacgaccgtcacctcagtaagccggaacctccatcgaggccgtcgaggggaacgccgggcacggtgcccatcccgttcacggcatcatttgtcttttccgcgaccccagacgattgggccaaagtcagcccgccgggcacatggccgacggcgttctgtgagagccaatcggagagccgggagtagtcgcccgtctcgtagtagcgcaggagcatagagacgaactgcgccttgtcttcgggagggatcgagaagacgccgatgccgtcgtgtatgagctggtggttggcaaccatcagcgcggtgcgcttgttgccgtccgaaaaccattgtccccgcgtgaccgcgccgaacagcagcatcgcagtgtcctccccttctgactcctccaggatgccgcgaaccctttcctgtggggactcgacggcggggatctccggcacccatcccgtgccgccgaccctcacgccgtattcacgcaagcggccggcgtcgcgcacgcggccttcgccgatgatgcggttgtattcgcggatgtactgccaatcgactggatagtcgatgttcccgagcaggaatccccacgcgcgcttgatgttattcaccgtgactatatcgtccacgctcataccctcgggggcgcgcccgtcgaagatttcctgcgtgtcggggaaggtgacgccatcaacctcgatcttggcggtgcgccagatcaaatcgaccagcagccgcttcgccagttccacggccgtgcgcctatccgtcgtcgtatcgttcctcaccggttccatcaaagccccttatccgtttccgataattctatcgaagtggccgtgccggcaaagggcgcatatctctcatagacgccatgcgccgccgtgccgggcgcgcgggcggagaatcatcgtatgataccgaatatcgtcaggggttcggacccggccggcctggtgcgctacctgttcggcaagggacggcgcaatgaacacaccgaccagcatctcgtgtgcgcgagcggcgacatgtttccctcgtttgacatggatggcaagccggcggcgtcgtatgcggagataggccgcaggttcgaccgacgctaccgcgtcagggaacgcaaggacgatccgttcccgcccgacatgaggggcaagaacaaccccgaacgagagcatggcaggaagcgcgtgtggcactgctcgcttgccatcaaggccgggcagggaatcctgaccgaccaggaatgggaggccgtcatccgtgattatctgacgcgcatgaacatcatcgacggcgacgacgatcagggcgtcacatggctcgcggtccgccacggactgtccgccaacggcaacgaccacgtgcacatcatggtgcagctcgccgccgacgacgggtggataaacccgtaccacgaccggatcaacgcgcagaaatcatgcaggcggatggaaaagacgcgccccgaactggtcgagctcgcacgctccgataccggcacgcgcgtcagctggcagtatgggcaatggcgtcaatgggccgaatggaaggcgcgaaacgagtacggcgacgacgagggatgggatgcgttggacggcaacgagagaagccggctcgtcacggcggtcgccgcctcaacgatgccacgccaatacatcgcccgaatcgtggaggcgtgcgccaaggcatcgcacagcgaggacgagttcatacgccgcgcgcgcagggaaggcttctccatcgaccccaggctgcgcaggggaaccgccaaagactcgttcaccgaccccggccaggtggtcggctacaggatcacgtggcgcagcacggacgggtggacggaacggttcaacgccttcgagctcggcgacgacatgcgattgaaacgactgcgcgacgactgggcggacgatgccagaagccgcgccctggccgtgcaggaatggcgcgccgcgatggagaaccgcccgcccttcctcgatgatggacgcgaacggcacctggagaacctgtccacgcacgacatggaacgcctcgtatccgaagcgttctgcatcgccgccagcctcaacaacgcggcggacggcgacgaataccgggcagcgatgcgcgagggcctgcacacgttcgacatgctgcgcgaacgctacggaatcgcgccggaatacggtctatggagcatggtcgcctctgacgaggagaaccggccccgccgttaggacgcttcccggaaaaagctcagatggtacggcccgaggaaggaaaaccgagcgaatcgggcaaagccgatgctggatcgagagagttcgccggctcgtctcccggcatgatcggctcgatggactcgttcgccttcgtccagcacgcgttcaggcgatcggccatccgcgcgtccaggccctcgcaggattcggatatgccggcgaggaccttccccgccatacgccgggccatatccgccaccctcgaaccatcgagaccgtgacgtgtcgccagatcctcccaatcctggggcgtggtgtgctccgcgaaggcgtgatcctcgttcaacggcatggtgagttcccaattgaactcgggccaatacctggtggcgaccgcatcatactggggagacaggcgtatccccgatgcgggatcgaggatcagggaatagttcttcgcatgtgcgtcgctgttggcggacgacgtgttgaaggccagcctttcgagccaccggtaggacagggaacccgacgcatcgatgcgttgcaggagatccaggcagtcatcggccgacggatcgtatttgtcgcgggtcggcaatcccaacgcttgcaggaagtcctcttgccgcagtcggacgattcggccttcctccaggcgacggtcgaaccgttccacgatataggccgtcttgcgctgcgccgtgatctcgccgcgtgccggtgtgtcgatgccgcacagttccgacaatcgcatcgtcgccagttccaccttggtcgcctcgggaaggtcatggggcttcggtttgacgatgtgggtggagggcagcatcatatccggccaataccacttgccgtccacgcgggacagtgtgaacttgccctgcgcccctcccaaggagaaccggcagtggctgtcctcgtcccaccagtagttcctggtccgctcgatgcggtcgatttcgttggctatctgggaatcggagatcagacgaagcgtcggcgatgggattggaggttccggggagagggagaacaccagtccgccggtggcgtcaacccggtccagcagatcgaagacgccggccgaggaggcattcaggtgctcacgcatggcctggcggacgttcggattgtcgggcaatagattgtccaggaagttacgcggtgcctggtctctccatccgccggttctgggcaggctcagactgatcggcagaccctcgttcgcgtcgtacgcgaacgatatgcgctcctcgtcgtcttccgagaacacgcccacatgatgcccgttctcccaggcgtgcagttccctcacagcagtctccccgcgtaggcggacggcagcgtttcggtgcggatgtgcagcaggtcgaacatcctgtacacgtagcggatggaggtcagaccggtctccgcgagctcttcggcgcttgagaggggaaccccggctctcctggcgagttcggcggcgtcgagacccatgacggacatgcgttcgcgcacgcaacggcggaccgacgaggtgtcggggaagaaccgcgccgggttctcctccttctcgtcgggaaggcccttgtaggcggtcagggcatcatatttcgacagatccaacgtcacgtgtgccatgctcgtcctttccggttccgaaagccgttgacaccatgatacggccatccgatgccggcgcaccccacgaacctcatggcaaggggtgcgccggcatcggcgtcagcgtgcgttgccgttggtctcgggttgcaggatctgcggcgtcgagacgttggcctggtcgggtatcggctggtccgtggggttcatggaggattccatggcgggactgtattcgccgaacgggtcgggcccgttccattcctcgggttcgttcaggtcgagtggcatctcctcgtatccgtcgggctccccggtcgtcaggtcgccgcctcccgtggtctcgggctcgggtccggatgccggtttgcgttcatcggcggcgggcttcgtatgctcctgcacgggtgtgggggtttcgacgattggcgcggcgtcagcgttctcggtgcgttcgacctcgcttatggtgctgggctcgtctcctgtggccttgttgtccgcgtgcgaggattccggcaggccctggtccttgaggaagctgattcgggaggcggcgtcgtccacgccgttgaccggcgcgcacatcacggcttcgacgatcctgtcgtggtcgtagcccgtccattggccggtgagccgcgagtccacgaagaacgtggcgtcgtcgccgtgcgcggcctggaacgcctgcgtgtcctccacccgttgcaggtccacgggcacgccggccgtgttgaaggcgttcagggtggcctgcaacgcgggcgactggtcggtgtaggtgatgttcacgtggttggtcaattggtcggctgcggcgtcgatgtgcgtttccgggtggcgtttcgaccattcgtccttcagccgggccttcgcctcgatgatctgcctgcggtagccggggtcgttgccctccagttggtcggcgaccatccatccttgcaagagggacgagtcgcgcatcttcctccagccgtcgccgtcggcaagcacggtcgcgttcagggtggactcgaaccccttgttgaggcgttccctgttgtccatctcccattgttcgaggcggatggattgctgctgccgtctggtctgctcgtagcgttcgttctggacggcgcgttcggcgcgttccctgcgtcgcgcgcggtcgccgctcagctcgttgtgcagggtgcgcagctgctgggcgacgctgttccagctctggaccatgatctggtcgaagccgtcctcgggatcagtttgagccattgtttctcctccttgttggcgtgatggtggtttccttgttttccttgccgcctgcggcggggaccgacaacgtttccaggatcggttcgcgccatgcccggttcgggcgttcgcagggcagcggttcgcccttcctggtgagattctgcttgcagtcgaggctggcgacgatgccacggtccttgtcgaaaacgcggtcgagcatcgacgccgcctggatgtagaagatcatcatctggccgggtgccttgcgcgcgttctcgtaggcgcgccacatggcgtcgagcgggaacacgagcgccggatagcgccaccagtcgctcacccattgcatgttcacggatgcgctctggtggtagcagaacacgttggctacgaacctttccacgaacgcggcgaggttcggatagtaggtctcgctgcgccgcattcgcgcgccgaactggccggacacgtcccttgcccgcgcgggatcgaggtcgccggattcgtctcggccgagatccgtcttcccctccggcgcgggcagtatacgggtgtcggattcctccgcaccggcctttggaggggtgtcgtcacggtccgttgcgtcttccggcgggttctcgtagccgttgccggtttccccggcatcggccggaatcccggatcggatgggttccgccgcgtgccggcctgccggcacctcgggtgcggtcggcgtcggctcgccttggcccggcatggtttcctcttcgatctccttgtcctcggggatgtgcggcgcttcggggttgggcagtcccttgccgtaaggcacgcccttctcctccaggatggcgcgggtgaacagttccagccatccgcagtccgatgacagcagggtcttggcggcaccgaccgcgcgctcccattcctccccatcagggccggacgtggtgttcgaggtgtgttcgctcattatgcggcctttctctgctcttctcgggctttcgccttggcttgcgccagggcgtcggcccattgcctgttgcccgtccatggcagggtcttgacgatctgcgctcgggattgggatgcgagcagcagcgcgcggccgacgggccattcggtcaggtcggaaacgtcgaggatgttctccttctggatcgagttgttcacgctgcgccggccggtgccgtcgatgttgacgctgcctcgcacgatctccctctggcccaccagctggctgatctcgccgaggaatttcgcgtccttgatgccgcccaggtagacggtgatgttcgcgttgttgaacagcgagccgaagttcgtctcgccgaacgcggccctgccctggtcggggttctgccagatcgtcatgatcgggatgcccgccgaaccgaaatacgagtacacgtcggccagttcgggccagcggcagatgttcgcggcctcgtccagcacgcagcacaacgggaccggcagacggcggttgttgccggtgaactcggattgggcgcgttggaacgcggtgaacgctaccaccgccgtcaggctggcggtcaacgcggtggagggacggccctgggcggaaagcaggtacagggtgtcctcgctcgtggcgaactcgtaggggtcgaacaggccgcgccgctcgtcgatgttcccattcgtatcccggtgcgggtcgatccagtcgatgatctcggggtccgcgaggaacgcgaccatggtctgaaggctgccgaacacgccgcttcgggtttccggcgtcagcgcgatcacgctggacacgcgcgaggcgatgcccgcgtagcgcgggtattcgctcaggatgtcggccggcgacgtgtcgcgctcgttggagcaccacctgaacacgtcggacacggaacggcctcccagatgcgcggcgaacaggtagtcggcgagctgctgggcggcggtgccggggaagaagtcgtcgccgccggtctgcggctggcccgaggcgtaacgccagcagtcggcgatgcgtttcgcgtcggcgatggactgcaccgaggcgatcaggtcccacacccacggcgcgctcttccggttcgggtccgcgatgcgttcggggtcgaacgtccatatttcgccgttcggatggtcgagcctgcggatcggggcggtcacgtcgaggatatcgcccttgttcgaggtcgccaggcacgggcccggtgccgagagcacggccgggatcgcgtagcacagggacttgccggaacgcgggcccgccagaacgatagccatgtcctcccagctggtgtacatcgacgtgttgtccacgatgttgagccccagcggatagcccggcgacatgccctttcgccagtggtccgcttctatgagccttgacgccatggcctcggcgcgctggcgcgtcaccttctccacggcctcgccatggcccatggcaggcgcgtacacgtccacgcgggtgcgtgccttggcgccggttgcccacggcacggccttgctggcgatcagccacgcgcccacgccgcacgccacggccagtacgacgagcacggccacggccagcgcccactggcctgcggtcagcgaccattggccggagaccaggtacatgagcgcgaagatctggaagggatgccccgcatgggagcacacgagggcgaacgtcgtgaggatcagggacaccgcgacgatgatcgccagttcgatcttgcggctgggacggaccgtgccgcccagatccttcactcggttcgattgcagtttcggatcgacgtcggccaagattcatttctcctttcaagcatcgacggcggaaccgatggaagcggtcccgccgtcgatgcgccagggcttgcgtcatggctagcgggcgttgcccgtcgtgaaatcggatggggtggaaaggaaatccggtgccgcagggtccgccggagcgggagccgcgcccggtgtcggatagcccgacagcggttcgaagggctcgccgttgaaagtgcggggaacgccgtcgccaacgtattcgccgcgcgaggcgtcaacctggtccgtccatggatccgttcgcccggcatcggccacggcaccggcctgttccttgttctggcgtttgcgttcgcgggcgagctggatgcgctgggacacgatggaatcgatctgcatggaatcgccgatcacgaccgggcgtgcgtatgccttgccgtccttctggctgatgaaggcgtcgggatcgcccatgcggccggtcgccaccacggcgtcgccctggcggaaatccatgccgtgcaggagctcggcagcctggccccagaatttcacggtggttctcaccgggccgagcggattgtccgtatagctgccgtccttctgacggactcgcgggcggtcctcatacacggtggcgcgcaggtacgccgagctcgtggtgccgtccgcgttggttttcgccggccagtaatcggggttcgcggcgaggagaccgcgaaccacttgcattgactgtggcatgatgatggtcctttcattcggggaataccagcgccttcaatggcggcggcgactcccatcatccggccggaccggtggcatcgcggggtacggcgtctacgcccgtcagcgccccaaatgcccgccgttctcccacacgttcgccgcctccatggcgggatcggtttccggcagacggtcgagcacgcttgacgcgaaccggtccgaggcgtcgtagccgatggcctgttcggcgagttcccgcgccttctcgccgtcgcccatggcgaggttgagcatggccttcaggccgatgatccggtagcaggcgtccgtcggcgcgttggcctccaacgggccgaggatccccatcgccatgtcgatgcgcgccggatcgggcgtggtgccgttgtcgatcagccgggaaaacagcaggtcggtgttcaccatgccgtccggcgtattgatgcgttcgcgcaatgccggaagggataggggagcgttctcggccagtatgtcgctggcgatcatcatgcatgttgattcgggcgcgaactgcatcatcacgcccaatacggcgagccggttcgcgtcggacgaccattcgcccgtggagcgtggttcggccatgagcttcgaccagtcgtaggcggcggcgttgcgccaggtggtgcgcacatgttccgagaatccgtcgtaggtcatgcctgagtccagatattcgtgtgtggctgcggtgatcagctcgtccaacggcggttcgtccgtatcggcggctgtggcctcgctctccacgatgaacgggatgcggggttcttcggaggccaggccgtccgtttcttccggctgctccccgttgatgcggtccgcttccatgcggtccacttcgccggcgaaccattcggagcccgcgaaataggtgccgtccatcgaggagagcaccggctggaggatggatgccagttcgtcgtacacggcatcggggttccgcaacgcctcgatggtttcagtcgccgcgttgtattcgatgatgcggttcgccagccgcatggcaccgtcatcgggtcgcacgtcgtcatacgattcgccccaatgctcgatccatccgatcatcgtttcccgtgtgatccgctcttcggcatcggtgttctccaaaggcatgttcggctccttgacaatcctcggcggcaacccgctgttcccgccatgaccccgatcatcagtccaaggccatggcggggtggggcatggcgtctacagggttcttacaggtttcgtcccgtgcggccggtcaggtcgtccacgaggccgaggagttccggttcgggccagatggagttggcgaaaaggtagtcgtccgtcaggggccggtccttgaatatggttcgcgcgtcctcccggatcgaggccagcgagccgtcggcgatcatgccggtgaggtcctgtgtgcagtacaggtcgtatggcgtgaaccctttgccgttccaatcgatgtgatgggtgatcgaatactcgtattcgttccagtgctccatccatggaagggcgtggtcgccttcacgggtgacgaccgagtagcggaaccagccctcgggaacctgtatggcatcgtcgtcatacgggtccgtcagggaatcgaggtagccggcgacgatggattcgccggcatggaattccgtgtaccatgcgaggtcgggattgcgcagcgcggcgtgcagcgagtcgagcagtgcggcgtcgttcatcgtggtcctttcaccggttttccgtttccggcaggatgccggtgttgtcgtatattctgaacgtttcgacggcgtgcgcgacccgcgccctcgattcgccataggtggcggaatcgaccgtctcacgccatacgggttcacgggtttccgcattgccgtagggctcggtgggggttatcgacatttcgaagtcccatgaggatgcgccgtgctcggcggggcggaagtcgagagtgctgcggttgcccgtcagccgcagcagccgggatcgctcgccgagccggtcgaagagtgatgcggagcgtgccacggcgcggatcatgcgtttcatgccggtggcgaggtggtctgtcatcgcagggttcccttctaggcgtgccatttgaggttcgtatcgttgaacccgcttttttcgagcgggcacatctccacgttgatggggattccgggcagtcctcccagtttgatcaggaaacggcccagacccttgtgcgaggcgtcggagccgaagttgacgggcgtggcccaatcctccagcatgtcctcctcgcgccgggatacgggcagtccgcattcgccgcgcaggtagcggtccacctcgatgcggctcaaagcgcccagcaccttgatctcgctgcgttccacgaagccgcgcgccttggtgttctgcgccggggtctccatgcacatgaggtccttgaacgtgtgtgtgatcatgatctggcctacgccccactgcctgttcagacgggtgagcaggtcgagcttttcgaccatgagggggctggcgcgcaaagcgcggtgcatctcgtccatgatgatcacgtggttgcgccggggctgtaatccctcctcggcgagcacgtcggcggcgttcttcgcggcgaacgcgctcgtccatgtggtcgccagcacggcggcgaccacatcgtcgcccgactgggccagggcgctgatatcgaagtccacgggcctggacaggtcgatgcgcgcggtggtctggtcgccgaacagacggccgaacttcgtcatgcggttcgagaatccgtgcaggtcggccagaaggccgcgaacctgcgccctgtagagctcgtcgttttccgggtcgtcccagaccgccgccatacgcacctcgtcgggcccttcgcgcagcaggtctcgcaggtccgcgatgacgggaggctgcgggtcgtcgccgtgccggtcgtggagcacgcgcacggccacggaaaggatatcggattcgcgtgcggtcacgcccctggcaccgcccacgtcgtcggcctcgcggccggtgcgcatgatcgtcaaaagcacctccatgagcgccgccctcgtgtcgttgtagtagtccgtcaggtccttgcgcgccttgccctccaagcgttgcagcgcataatggaggtcgccggggtccagggggttgaccacgccgatgcccgctcccagccggatgacctggccgccgagcatgttgaccagtgaggcgtagtcgggcttcagatcgccggggatgatcgcgttcatgcccagggcgctcagtcccagcacctcgcggcgcacgaacgtgctcttgccgatggccggcaggccgagcaggaacatagagggctgtttgatgatgccggccttgaaccagctgatcgggtcgcagcacacgccggcacccgtcatcaggcttcgcccgaccggcaccccttcggccggcagggccatgtcggtgccgaacggccagaacccgccgcacacctggttcgacgtgccgaagaactcgtctatcgtgggcatcagggccgcatagccgcctccacgcgagcgtttcccccgccacggcatcgggggcacgggctcgtccggtttggccttcaacggtgtgagcagcatggattccatgcgtgccacggggtccgtggccgtggcgcttggcatggttcccttccgtttcgacggcttccatggcatcggcatcacgtgtcctccgttcaggacaggagccggccgagggggccggctggagtgtatgatctgacgttcaatccaaggggcaggcttgcggcgaatcccgtgtcctgtgccccgtagcaggggcgcaggtcgatcttcgcgccgcctgcggcctgttccacggcgcgtgacgcggcttcgagtcgttggctttcctgttcgcccctggacacggtgacggtgacgagcatcccgaagaacaccatgaccgcaccctggttcgtttcgacggcctggcggttggccttgcctatctggctcatggacctcaccgtggcgcgtttctcctggctgacctggttggctgccttctgccggttctgttcggccatgaacatggtcttgtcgggcggcagcatccggtagagcacggtgacgcgcttgcggtcgcagtccgccaatgggctgagcagtcgggtgagcgtgtcggcggtcacgttgctttgcggcgggtccaccatctcccatgtgcggctcagcccggaatcgtgcgaataatggctccagccggcctcgtgcatgagcggcccgcaatcctcccatgcgatgtacgggggctcgtcggattcctcgatggtctcctgcgcggccggatcgtaggcgacgcggaccatgcgagtgatctcctccatgcccagggccctcgcggcaccgcctcccgcctgcgctatctgctcgcggatcgagggcagcagcaggcttatgcgacgcgcggcctccccggcctccaggtatttgccgtcacggtcggtgtagcggaaagtcaaggtgagcgtcacgtcgttggaagcgccgccggccgcgtactggtccatgatctgcgccatggcgcgcgccgcgagctcgggagcgtcctccacgatgcgtttgctcagcgtgcggcggaaacgcacgccggaatcgggtgccgtgtccacggtcacggccagttgggtgacgccggtctccgaggcgagcgattccatgagcccggcccacgaggccacgtacgagtcctccacgtcgtcgtcggcgaggctcgcgccctgcggctggcatgacaggagcagcgagtattcgccggtgtgcgcgtgcctgaccaggcagaactcacggcccaagccgtccagcgccgaggtcaggcccacccgtgagaggatgcccggcagcatggccttgccgccgtcgatcggcgcgagcaggccggaacggtacaggtttgcgccggtacgctgcgcggccatccacgtgcgtttctccacggtgcggtccaccatgttgcggtgctcgcggtccctgatcgccagcacgaggatgacgcccatgccgaccacgaggatcgcgatggccgcgaccacgctcgccatgctgaccagcagcgtgcaggtcaatacgcccatgcccgctatcgtcaacggtatgccgatgttgcggatgcctcccggcatcggccgcatccaatccccgtatgtcgtgttcgacgccatgattatccgaatctccttaatgcgtcagaatgtcttgcctttgcgcgtggaggaacggtccgcgccgtccggtgcgccctcgcgggcgaacccgccggcatcgttcgttccctgcggcctgttgccgcctgacgggtcgggtggcgcgccatcgggtgccggtggaaccgggcttcccgtgccattgccgttcgttccctgcggtttgccgccgttgcccttgcggttcgctccctgtggctggtcgccggtgttctgtggttcgccgcccgtgggattgccttccagcggcttggcgtgcttgccgccgccgttcgttccctgtggtttgccgtcgccccggccgagtccggaaagcagtccggccaaacctcggccggcaccgggtttggcaccgtccggtgacgcttcgccgccaccgctgtcgccgcctttcctgccgcccttgccgcccatggccttgcgcaggccgccgccggccacggcgactcccatgccgagtatggagggcaggattccgccgccgccaccgccgaccgaggattgcacggcgggcacgatcacgcggatcatggcgggaaggaggatgatgacgctcagggtgagcatcagcgtgatggcctggctgtcgtcgccgggcccggccgtggccatgatcgccgagccggtcgccatgaccagtgcggcgacgggcttgtaggccaggaacgcggccagccagccgatggtcttggcgaaagcctgcttgccggtctccatccagctcatggcggcccacatgggtgccacgcccaccaggatcggcagcatcccggcgcggaagtaggcgaatatcttgctgatcagcccgcagatccacatcacgatggtgagcacgatggcgacgggcgcgccgagattgaagaacgagctcgcggccaggcttttcgattcccaggcgtcgttcatcatgccgcttgcggacctgagcacgtcggcggtccacgtgtcgaatgtggcctggaacgtgttgaccagtccggcaaggcacacggcgctcaggatcgcccacatgaacgccttgcccaacgggatcaggtcacgtccctcctgttgggtgacgagcttccagccggccgcgatcacgccgcacacggccgcgatgataaggaacgggtcaacctgcatacggatgtagtccgacaggaagaacgtggtgccgccgcccggcgtccatgacggcaggtccggattgccgccggacgagcgggagaagaacgtgagcgcgatgctcgcgcacgaggagccgagcagcacgccgagcagtatccagccgatgcggtcgagcagacggccctcgccgccctggccgatgttccacacgatgcgcgcgctcagcacgatcaggctgatcgcggcggctgcgacgagcacgccctgcgcgatgcgcaggtaccggttcaccggtgcgaaccacgaatcgtagttcggcgtggcgttcgcctgcaacgttgataccgtgtcgttcgcggcgaccagcgtgttgcggctggtggacagccattcgatcgtggaatccgattggacctggtacatgttccacagggtcttctccagccaggagagcttgcgctgcttccggcacgaggagtccttgtactcccatttgccctcgtcggacgactcctcctgatacgtgttctccaatgccctgcattgcagttccggagacttcctcagcagatccttcgccgccttcttggtgccgaccgcgaccgcgccggtatgggcgggcgggtcgccgtactggtcgatgacccattggatctggctggggccgatcaggtcgccgagcttgccttcgggtatcttcatcacgtaggtggtctgggtgtcgctgatctgcttgtcgccgaactccagttccttgctgaacgatccgaagtcgggtccgccgcaggcggcgaggcccatgaggcaggcgagggcgagcggcagcgcgcacaggcgctgccgtatgcgtcgaatccctttcatggcttttctcagcagcttgcggtgacggacaggccgagtgcggcgaggatggcgacagcgcccgcaccgaggaagatgccgatcacccagttgacgagcttgtcgaaggtgtcgtcgcggtctggcacgccgtcgccctgctggcgcaggatgtgcacgccgatgcgcaccagcgcgaccacgccgatcaccaggctcagcgccttcacccagcccagggcggtggataccggtcccgagaatcccggaggcaggcacggggtcgggtcggaaagggtctcggcgaggatcacgcatgtttcatgcagcattgggttgttcctttcgtgttaggttcatgcaccatcgtcagccgacatgggccgtggcgcggggcatggcgtctacgtccttcacgagccgtgagtacgcggccggataacgccggggaaacccgtcgagttcaagccctttgatatggggcagccgccacacgcggacggcggatgacagttggatgcgcgccgccaccaaaggccggggcatacggggcacggggtcggtgatggccgcgcccaacaggatcgatgcgccgaacagtccggccgactggtcggcgagcagcgcgcgcaacgattcgaggccgcgccccgtgcccatggcgcacaggatgatgcgcgagggcatggagggatcctggctcaccggcagcgcgcggccggcgtcggcgaaccggtcggggtccgaatggcggatcgtggtgcatccggcaccgccgtgcgcgcccaccagccacacgcggtcggtgacgggtgccgcgaacgacgggatcaacgtggtcagttgtggcatggtgttggtcctttcataggctcgggtcggtgccgggcagttgcgaggggtccgggttcgcgggcaccgaccagcccggagacgcggaaccgccggtcgagccggcggaaccgccggaggaatggtatccgccgcccgtcgggccggaacccgggcccgaagcggagccggagggcgtgtacgagtactgttgcggtgccggcgtgctctgcgcctgtgccgccgcagccgctgcggcctcctcctgcgctttcctttcctcgtcggccttggtcttcgcgtcgatggaggcgttcaccttgtccatggcgtcggtgatggccttctcgtcgcgcttgtcgatggaggcgcgcagcagggcgcgagaatattcgtcctgcaccttgccttcggaggaggaatacaatcgttcgccctgttcgacggtatgggccagccgtgaggagaacaccgcgcccgccgccttcttcagccgcgagagatttcccgtgtgcttcttttcgatggcttgcagcttggatgtggtggcgttggccgtttccgtgtccgtggcggcacatgcggggattcgctcgccctcggaatattgttcggccagcttgtcgagggtttccagggtttccgggtcggcgagcttgtcggccgtgaccgctttcgcctgtgcgagccggtcgccgtcgagatattcgaccagcttctgttcggctttcttcgccgcagcgtgggcggtggcgcagtccgccgtcgcctgttccagctcgcgtgcggccgtggcggattcatgcgatctccacgcggacatgccggcgaccgtgacgcaggccgcgagcaggatgccgcccgcggtcgtggctatgcgcctccattcgcgcacgggcatggcggcatcccggtcgccgaccggcgtgaggtcgatcgtgtcggcgagatcggccggctccacggcaccgccaacgtgctgcggttccgatgccggggcatcggccgggatatcattccccaccggattcgaggccgatggcagcgggccgatctcccacggatcgacggcagggttcgcccggtcttcgcttccggcgtcgtccacgcatcgcgcatccggctcccccgggcccgggctcgggttcgggttcggccggtggccggcgttccggttccggttctcgtgccgtgtcgatggcgacggcggtgccggcggcgattatggggcccatttcccatgggtccgtgctggaggtgttcatcggttcgggaagaggcgctggcgaaggctcgggcggtccggcgcggtggcggtcatgccgtcggcggcgtcggcctgccgttcgcgcagctgccgctgttccatgacccatgcgggatgctggccgtgctcgtgcgcgtccatgaggcagcgcgtgacctcgccctcgggcgagaccgccgcgagccggcccagatggccggtgaacgcggcctcgggatcgccctgcatgaagctcatgtacgcggcggcctcaagcgcgccctcccttcgcgcggaatccgggatggtgttggacagccgccacagcagtgcgggtatgtcctggtggaactcgctgttggcgatctcgcgcacgttgtagtcggcctggtaccacggtttgacctggcccgaggcgaacaggggcaaggcgcgcggatcgtgctcggcgaccatgaggaaacgggcgcgttccaggcccggcgatatcagcttggcgcacacggcgtcgcgcagccccgtgtcgccggacagcgatgccagcagtcccgccgtggcatggtctttttccgcgtccgcgccgatgcggtattgtccggcgcgcagcgagtcgagaaaatcgaatacggccaatgcggtttgcctgtcagccatgtgcaacctccagaggaatgatgatggtgcgaacaatgtcagagtcgatgatgcgtcgggtcgcgggccgctgcggggcgcaccgtctacaggccccatcgggagcacggcacggttccacggttccacggttccacgggttcacgggttccgggcatggaaaaggcccttcgccgggagaggctggcgaagggcctgggggttcacacgccgtccggggcacgggattcggaaagtatgcccctttccggcatgtgaagtcaatggagggcgtcccggccgtcatcggacgacgaggccggaacgccacggggtcacttgcccgcgttcacggccgtgtggcggccggaaccctgtgcgcagtggcgcttgcggaacacgagcagggagccgccggcgagcagcaccgccagggcgccgccggcaaggccgagcacggccgcgccggtggaggccaacggcttggcacggtatccgttccagtcgtcggtgttgctggtggtctgggtgtcggcgcacagctgcttgccgtcgatctcggtcacgtcgccggtggagtattccggatcggtgtcttcgccgccgtcggtcttgtcgttgaacgggtcgccgttggacggcgcgcattccacgagcggggtgccggtgacgatggcgcggtccgtgtgggtatcgccttccttgacgcccttgagcgtgccggtcacgctgaccgattcgcccggcttgagcaccagggtgtcccagttgtcggggtaggtgagcgaatccatgtccacgtgcgcgtcgccgacgatggtggagtcgtcgaggttcaggtcgcttgccttgtaccatgcgccgtcgccggtggccgggtcggtcttggaggtgttggtgatgatgaacgtgatgccgatgttgtcggcgtccatcttcagcgcctgcttcgggtcgtcgcggtccgcctgctcctggccgtcctgcttgagggtcggggtatcgaccttttcgaggtggatgctcggggtcatgtccggggtcttggtgacgaccttgttggattcgcgcggctggccgttgatggtctcggtccacgtgttgggcacctcgtcggccacggcgatgcgcttgcactggaggtagagcacccagccggcctcgtgctcgttgtcggcgcttaccaggtcgaggtaggcctgggtcgcgtcggccgtgaccttgccgttgtcgtcggcgtccacggtgaacaggttgccgccgaacttcgaggagtcgaagccgctgcccgcgatcttctcgcccttggctgcgagcatctggccgtccctgtacaggtcgcggctggcgtagacggcccagttgcccaggtactggtcgtactcggtgttcagctggtccgtgccgccccagtccgtgacggtctggtaggcgcggtccgggggcaggatgctggaatccagtcggtagaggaacgtgtggttcagatacacgctcttgccgtcgatgctgtcgccgccgaccttcacggtcacgtccttggtcgggttgatctccttcagcgggttggtgacggtgttggtcttgtcgcgcttgtcgttcgtgacctgcgtggcggtgttctccaccgtgtggccgtccttgaccttggtgacggtcatcggcatgaccacctggtaggtgtggcccagcagcgactggtcgatgctcgggtccttcagcgggtcgtaatccttgtcggttttctcgctgtaggccttcaggtcgtcgggctgcgggtcgccgggcacggtctcgccggtcgcggggatcatggtgtcaacggtcctggcgaaggcgtagagcacgccgtccttgtcctggatgttgaactcgccggtgcggtccctgccggtctcgtcaaggatctccacgtgcttcgcgtcgagggtcaggtactcctggtcgtagtcgtccgtcatgcccagtcgccataccttgtaggcggtgtcggtgagcctggaggcgtcgatgttgacgcggtagtacaccttgtcgcccagcagcgcggtcttgccgtcgatgttgatggtcgggtccttctgcgtgtcctgcttggagggcttgatgaccggcggctcgttctcgaccttgttggacggggtgacgccgttgttgacggtcagcgcggccttgttgccgacggtcttgtcggtgggcgcgtcctcgttcaccttggcctcgaagcgcagcagcacgcgcgggttggagccggccttccagttggcggcaacccagtccttggcgaacgtggcctcgaacgagtggttggcttcgtcccactgcaccttgtaggcgctcttcgggatgatgccgccggttcccaggtcggtgatctccagggtctgcttgttcgcggtggtgtactcggaataggtgtcgctcagcttgatggcggtcaccgaatatgcctggtccgcggggatctgcgggtccacgcgcacggtgtattccacggtctggccggggaacacggtcttggtgtcgatgctggactggtcgccgccctgggaggattcggcgatgacctgcttgtggatcgggggaacggtcacgcagatcttcggcgtgttggtgtccaccgtgctgccgccgaccgtctggccgcccttgttgtcgaggtcgtcgcccttcgggtccgcgcacgtgttgagctcgtcgccctccgccttgccgtaggattcgagcagcttcacggtgtcgaagttcacgtcgaaggggatcacgacgctgatctgcttcgcggtcttcaggtccttctgcgcggcctcgtaggagtccttcgcgctgaccgtgaccttggtgccctcggcggtgatgtcgaactggtcggtcacgtccctgccggtcttgttcaggtcgttgacgctggcgttggcctcgtcggtggtgtcctgctcgtagaccttgatgttggaggtgtccttcaggtcgaggatgctatcgacgttggcgaagtcgtcggtccacgcgatctcgggcacgcggcccaatccggtgggcagggtgccggaaacgaccgccgccacctcgtcgccgagacggtagtacttgtcgtcgccgcccaccttgtcgcttttggtcggatcgacggtcagctgccacttgccgccgaccttcatggcccacgccttgttggggttgggtgtccacacgaacaccggcggctcgttggtcggtcgggtctcgttgttccacttctcgtacgccttgttggtcagctggatcttcttgccctcggtggcaccctttttgatggtgcccgtcaggtagaacttgaccttgctcgcgctgttcctgaacatcgtcttggcgatgtacgaagccttcgcggtggcggtcgcggtcccggccttccggtcgatcacgatatcgaactggtcggtctcgtccttgccgtcgacgaacaccttgccggacttccagtcgatccactggttcgaaccggtcagatcatcggtgatggaataggatgccagcgggttgagcaggtgcgcggggatgctgccgttgacgaccacgcccacctggtcgcccacgaggaacgtcttctgatcgacgccctgctggttggtccattgcttgtcctcggccacgagagcgccggactcgtccagcacccacaccttgtccggggtcggcgtgaccttgcccacgctgtcgttgttgccggtctggcagtcggccaggctgccggtgccgttgtcgccgttccagcacgccacggaaccgtcgttgatcttgtagtcgccgccggtgggtttggccgactgtggcacgttcagtgtgtagaggccggaatgcggggcggtggcgtgcgccttgaccacgcgcttgccatcgatggaatcgtcgatggaaatgtccgccggcacgatgttgccgttcgcgtcggtcacggtcaccttgctcacgtcgtcctgctcggtgccgccgatcaccacgtccctggtgtcgatcgtgtcgtagatccagaacttgccggaggcgttggaatgcgccttgatgtgcgccgtgtacagcgaaccggacgcgatggagtcgttgccgtcccgcaccgtgtcgccggcctcgttggtcagccatttcgacggcggggtggggttcttctcgccggactccttgccgtcgttctctcccttgtgggagaccgcctcggccatgccgccctgcttcgccacgtcaacgtcccaccagcgcttgcccgcaggccacgactcccacgaggcgtccatgtccttgaaggacgcgctcacggtggcgctgcccttgttggatgcggtgaactgcttcgccaccgtcttctcggtgccgtcgatgccacgccagtgcagggtcgcgccagtgcagggtcgcggtgccgttcacgttctcggtcttcgacccgtcgctggacagggtgatcgtgtccgaagcgtccttggtgtcgcccgactggcccgacatctccgcagcctgcgtgctcacgctcaagtgatagttcggctgcaccggctcgtattggttcaacatgatgacgatcgcaaccgggctgttattccactgggaggccgcgatcgagtccaccgaacgctcaggagcatcagagaaaccgtcgtcagtgtcataagacgcaccattattgtggtatttaaccggtgcgatgtttttgttccatgcgtcgctccaataggaggcggtggcgaagccttcgccggaataggagtgcgtggtgggcgtggcgaccacgccgacggcgaccatgcggcagttcgcggtctcgcccggatgcttgtcgttgaaacgggccacgcattcattgttggccatcgtgatcgcggtgttcgccgccttatcggccccgccgttgtagttgttataggtcgcgcccatcttcgccacggccttcttgaacgcgtcaagggtagcgccgccgaaaccgccgttgttgttgtcctcataggcccagccgatcaccgagccgccgacactgccagccgagccgggagcccagccgccgccgccgtcggccatcgcggtggccgcgaccatgccgccgcctgccagcgtcgccaccgcagtcaaagcggccactgccacgcgcagccccttcccgttgcgggcatcagcccgtttcctctcgttgaaaaccatagggtttcctcctgttagattcttgtttccgaccggcctaaaagccggtagccggagtccggaaaacttcggccacaaaccattagaaccccatttcggccggtccagtttggacattttttccgatcagttacgcgagatattgaccacgaggaagggaaacgcctaaaacgcatgattcggggtatctaccgaaataccgaaaccggtaaaatcggtgcataccgaagcgaatgataaaaaaactcgcccgaacgaatcggacgagtttcatgcctgcatgtcagcaagtcagacgccgcacacgctctccgggcaagttccgcccggagtagcagctccatagccgctgctgtagccgaagctcccgccgtaggaggaaccggcggagccgcctgtggaacctcccgtggtgccgcttccgccaccagtggagcctccgccgtaggggtatgagggtgtccaggattgctggggctgagactgctgatagttgtactgctgttgttgcgtctgggcgttcgcagcggcggcggctttcgcatcggcctcggcctgggccttggctttcgcctcctcgtcggccttctgcttcgccgcgatggaatcgttcaccgccttggatgccttggctatcgcggcctcgtccttggcttcgatggccttggacagttcctcgcgcgtcttgtcatcctgcacgttgccgttgctggactccaacagggttttcgccgtgtcgatggtcttcgccagcttcgagtcgttcaccgcgtccaccgccttcttcaggctcccggcgtgcttctcgtaccatgcggccgcatcgtccagttcgtcgatcgccgtttcaagcccgtccttgccgtcggccacgcagccctcgtattccggcgcttccacgtccagcgcggttttcagcgcgtcgagggtcttcgcgtccttcacctgatcggccttgacctccagcaagtcggccgcgtcgccgttgacgagcgtgttccagtcgttcatcgcgccgcgcgccgcgtcggaggccgtggcgcacgcggccttcgcctcggccagtcggcggtccgaccatattttccatccgatgccgccggccaccacaagcgccagcgcgcacaggcccgcgaccagcggcaccagccacttcggccgaacacgcctcgactcctcgacggcggcggtttctccgttcgtgggcggcggggtgttggtttccgtttcctgttccgttttcattcgtgtcctttcatcgttcgtttcggtatgcaccgattttaccggtttcggtatttcggtcattctctgtcggagccggggttgccggtttccgcgcgttcatgccgccgccggtggcgctctgcaccgttccggttcgggcacctgcttgtttcgcacgacgtctcgcgtcatgcgagataggcttcgagcgcgaggtcgatgacctcctggatgcgcatgtcgtgcgcggcggcgtaggtcttgagccgccgccgcgtttcgggcctcatgctcacgctggtcttggaccattcccccgtctgatcggagcggaagacgtcggccatgccggagacgctgcgggtgcgggctgcgggcctgaaagccatgtcgaggttcctcatgcgcgcgcccccatcgcttcgacgatctcgccgagcacctgggggtactcgtggagcttgtcgggggagtgccccatgccggccttgatgtcctgccgcttgcacacaacggcgtcgaaacggggcgtgccggcctcgtcaagagcggcgacggtcgcctggaaggctcgggtgcggggttcggcgcgcacgatgagcaccgcaccgggcttgccatcgggaatcgcgttcatcgtcgcccacgcctgctgcagatcaatgggcgaatcggaggtgggcacgaccacgaagtcggcggccttgacgctttcctcgaacagccggccctgcggcggcgcgtccaccacagcgaagccgccatgcccggcacgggccagccgctggagcgtgctcaggttcgccggcatcacatcggtgcctgcgggccacccgccgttttcctcggccatgtccctccacaggctcgcgctggactgcggatccgcatcgagcaccgtggccccctcctcgaagcgccgcgcgtatgcggcggcgagatagatggcgcttgtggtcttggcgacgcctcccttggcgtttgcgatggtcacgatcatggttgtttctcctatcggtatttcggtgttggattcgtatcggtattccggtatttcggtattccggtatttcggtattccggtgttggattcgtatcggtattccggtatttcggtattccggtatttcggtattccggtaattctggcgtggtcaaaacaggacgccttggatggccggcggaaccgacgccgcgtcggtgaagctcggcgcgacagacaggcgttcacgtttgcgacgttgcaggcgcttgcgctgccgccagtcgctggagtccgccagtctggttcggtcggcccagtccggatgcctttcaagccagtcgctcacccgttgcgcgggcatgtcgtgcagctggcgcgccgtgatgccgaggtctcggcagaccagtttcgagagtactgtgcgacgcctgtagtcaagacctcctatgaggttgcggtccttccatccgccgacgagactgtcggcgatgcaggtggttcgcagggggcacgtctcgcacaccctgcgcccgagcgcgcgcttctcggcatcgacgacctcacggcctcccaccgtaatggtcgcccacatgcgatccgcgaggtccgggtctcgccgcgcgatcttcgcgcagggagcctgggccgtcatgatcccgccctcgccccggcgaacatgtgcccgccgttcgccttgcgtatgtcggagagccggcgctccatctcctcgcatcttgagcagcttgaccggtttccgatagtccgtgagggtcgatgccagcatgttcctcgtggtcatcggcttgttgatctccatgattcgttaaccttgtctgttcatcccctccctcaatcgttccggtcatggccccgccgcctcttttttcaaggggtggcggggcttccgaccgcaggaataacgggaggtagccaccggttgccccggcagccaccaacaagcctcacagacgacacgccgaactacggagcatggcgtctacaaaaaatccggaagtatttcccggcaatacgggtacacgggaatgcgggggcacaggttcacagggacatggctttcctttgcgaaatccatgaaaaaggcccgtaccggtttcccgatacgagccataatcagtcattcatcgatcagtgatggtaatagccatcatccttgccggtgcagctgttgccgcagccgtatgcgccgttgaggttcggctttggggcggcggcggccgggccggagccgcccgatgtggtgccacggtatgtgttggagccggaagtggagccttccgtgcgcccgtacgcgccgccggagtaggaggagacgccgctgtaggtggattgggcctgcgcctgagcctgggctgccgctgctgccgctgcggcggcttgcgcatccgcgtccgtctttgcctggacgctcgcgttcacgccattgatggcatcctccagcgttttgcgcgccccgtcgatcttcgccggatcgttcccgtccttcagcccgttcgccgcgtcgatggcgttcgacaatgcgtcgcgggtggcgttgtccgcgaccttgccgtccgaatccgcgagcagcttcgacgcctcgtccagcttcgccgtcagattcgttttcgcgtcatccagcctcttcgcggccttggattcgacgacggccctcaccgccttcgacaggctcttctcgtgggtctcgtaccagtcggcctgttcattgagcttcacggcggcggcatccagtccttgcgcgttttcggccacgcagccctcgtattcgggtgccatggccttgagctccttgcccaaggattcgacggtcttcgagtccttgacctgttcggccttgacggcggcggcatcggcggcatcgccgttgagcagcgcgttgtattcattggcattgttgcgcacggtgtcggcggcggtggcgcacgcctccttggcctcggcgagcttcgcgccgctgtaagcgttccagccgatgatgccggccacgaccagaatcaccgcgcagacgacggcgatcaggggcggcagccacttcggacacttccttccatccttgcttggctctgtgatgttctcggcgggtgtttcgacgggttcgaggatttccgtcttgtcgttctcgttcatcattgttctccttgcattgataacgctttattgatctgccgggatacccgcgtcggattgcagcgtttcccgcgcgatgtcgagtagccgcccgtcacggccgggttgggcgtccgctgtgtgggagagccagtcctgatcgacgtcgagggtcaggtcatcgaaggcctgttgcccgtcgtcgcggcccagcaggccgcgtagcctgaacgtctcgttcatgtgctgtccgtcccattcgatgcgccgggcgtacagcaggaaatccagagtaaggaaccccggcccggccttgtccacctgcacgtaccgggagcgcgtcggcgcgagcctcacctgcggcacgcctttcagccgttcgtgcaacgggctgcccggcacgatgtagcgtttgaccaggttctgtccgccggccgcgaagaacagcatctgcggcagattgccgtaggtcgcgtcgtaatagcgccatccctggtcgtcccgccatctgcgaagcatgtcacgggcggcccccggccccagatggatgccggagaaccgttcccacgccagcgtcacccggtcgaactcgccgcgcatgagaccatacagggcccgacctgtcggatccttcggatgacgtctcgctcgggtgtccgtccgatggttcggatccgcatacgggcagtgcaggtaggcgtcctcgtcgtagcggcacaggcccggcacgtcgccccggtggtgccgcccgtagggccggcgcgcacggctttcctcctgccggcggaacaggccgacgatctggatgggattgtcgcacagcgggcacaccgcgtagtaggacggccccgtgtcgccgtcacgacgccacggggccacgccgccggtgcaccccatgtatgactcttggctgatcacgatgctttccgcccttcccggccatgccttgaacacatccatagtcggcccccctcgccgcgcatcgtcgtcattgatacctcctgttgatattaacccaccaatccgccggcagctcgggcaccgcgccctcgcgttcggcgaacgcgaggcacgcgagcaccgtgcgcaatcccaacgggaactcccgccgtccctgacgcatcaggaacgtccagtcctccacgcagtcctcgcaatccgaatgatccatgatcccgcgacgggccagcacggcccgctcctcgatgtcatccgtcatcatccactccttcttccgtcttgcttcgcctcggcccttgcatccgccgcgtcgaggggcgggcagtcatgttcgatccatgccgtgagcatgtcgcggatggtggtgccgcgtcgcacggcctcggccttgaaccgtttcttgagctcggggtcgagctccaccgtgatcttgggcagcttgaccggtttcttgtagtctgtgagcgtcgatgccagcatgttcctggtggtcatcggcttgttgatctccatgatgtcgttcctttccgtgttcccgtatccacgggtttgcgtggatacgggattgcgggttttcggttttgcgggtgtcatgcggcgaatgcgtcgctgagttccctggcgataagcccgtagcccgaagcggacgggaaccgcccctcgtccgatgcgagacgcatggcctccttgtacgggatggtctcttggcatcgggccagtccgttctcggccaggaactcctcggcgtgcctgaggctgcgcgtgccgtacctggtctgggtcaacaacaccgaggagggcttgttgatctgccggatggtctccagcatgcgttccaggtcgatggggccggtggtggtgacgagcagcacgaggtcggccgcgtccaccgccgcctccaccagatcggtctgcaagggaggcgtgtcgatcagcacccattcctcctcggcgggcgcggcgacggtgaaccggttgaccacctccaccgggaacggcaggggccggccggccgattcggccttgtgcgcccacagggtcgccgcgccggacgggtcggcgtcacgtaccgtcaccgtgcggccgaggcgagtgagcgcttcggcggtgccgatggcgctggtggtctttcccaccccgcccttgaggttgacgaaggccacggttttcgtgttcgtgttcattttgcattgttcctttcactggttttccggcttcccgtgtccacgggtggccggtttcctgtaaatacgggtttccgtgatgattcggcctcatgggccggatcggtggtttcggttggtcggaatgttggtttattggtttgccgttttgctttcgggagtgggaatgcgcccctcggcgaggtgccgtttggcggcgttgatgaccgtgccggtcatgtcgggggatgcgtcccagcggcggcgttcgccgttcctggcggtggcctcgaacctgacggccacgtactgttcccgacagtcgccggcatcgatggtgatggtggcgggcatggccgttatcacgccgccaagcgcatacacctccaatcgtttgatggtcctggccgttccgtccttggagggcgacggcgcgaactcgcggccgaacctggcctccgggatcgcgccgcgcgccgcgttctcgatcacgttcgccagctttgcggacagcgtcttcatcgttcgcctccttcgtttgccgcgtcgatgaccgccaccaccacgtgacgttcccagtcctcgcgtgatgcaaaggcttcgccgcagttgcacacgtactcgccgtgtcccttggccgtgtcgaagaagcaggagggcgcgcagtccgcggtgtggaaggcaaattcggcacgggcccgttccagtcccgcgaccgtctccttttcgacggcggcgggatcgacgcccttcagcgcctggctgagattgcggcgcgcctggccggcggtcatgcctgtgtaggacagcacgtatggctcggggctgaagcaggtgactttcagactgcattcatgcaatgcttccacgctcatggttttttcctttcaatggttttccggcttcccgtgtccacgggtgcacggttccacggtttgccgcgtatacgggtttccgtagatggcttggccttgcggggccggattggattgttttcagaagagggtgtcctgcaagggcggggtgtgtgtggcggcggccggggccttcgccttgccggtcgagcgtgtggtggcgcgccatcgttgctggcgtgcggtccgctgctcggtactgcgtcgtctgcattcgcgttcgcgtgccgccgccacgatttccgggttcgcgcggatgaagcgtgcgagccgctgttcggcggtcgggtcgttcgggtcgaaccggaatccggcctcctgagcgattttcaggacctgacggcgggccctcaacggcagtccgccgtagatgccgtactggtcctggaccatgatgccgaacgcgaggcattcggccctgaccgggcaggcctcgcagatccgcaccgccgcacgccgcagttcgtattgggttcgctggttgggcaggtcgtcgggcccccacatgcggtccgaccacgagtcggggaaatccgcgcattcgcctttcaggaacatgccggcacctccttcggcccacggccgccgatgaagccgaaacggacggatgccggcccggtcccagccggcttccgccgcccgaagccgtcgtccttctccctggattccgcgtccaggaaggcttggcccgctcgcaatgcctccagcacggcattgcgttcgccttcggcatcgttcgcggggacgcgcttcaacagccgacgcaaggtgcgcggtgcctcgaacccgtcattgcccgcatcgaagccgtaagggtcgagcagtttccacacgcgccggtccaggttgtcggggatgccgtagttcggcaccttcggcatggatgccgcgctcggcggttgcgccggttcgcccttgtcggcgatgacgccgtgttcggcgagcaggcgacgcccgtgggggtcgtcggccatctggaggcatacctggtcccagtgccgtgcgagggagcgggggccggtgagcgtgcgacgccagaaaccgtcatacggtttgccggaagcgtcgcccttgtcggtcttggaaggcggcagcgacgcccattcggccacggccagcaccagtggcatgccgtggcgggcgatcagccgtcgggcggcgtcgagttcgcgtttgccgggccgggccaacggttcgggcaccggcatcggcggcatggcgcgcagcccgtccgccatcgtgcggcacaccgcctccgcgtcggaaccggccccggcggattcgctgcttgggggttcggctccggcggcgtcggcccatgaaccgtcctcgcggattccgtcatcgtccggggaggtctctccgcttgcggggagatgccccgtaggggcagaggggttattacgtactagggacgtactgtagctcaccaggtgagctgggggtggggtcacagctgtgaaccgtggttcacccgtgagctggggttttcccgtgtccccgtcgccataaccacggtccacatgtgagccggggtttcccttcgccctgttttccgtggaaggccgtccgcctcgggtcgagtcgatgtcgttcgagtcgaagaagtcggggtcgagctccagacggttccctaggcacaggtcccacacgacgggccggtgccactcgctgaaatgcccggcctggcgttggtcgccgcgacggatcagcccgttcgcttccagccatgacaggtggcgtttgaccgtgctcacgctgcacttgcaccacgcggccagcttcctgtgcgtcggatgcgcgttgcgcccctcgtcgtcggccacgttcgccagacacatcagcacgcgagcggcaccgttgtgcctggcgtccacgggcgcgaacctgagcgcccaatcgaccgcgttcacgctcatgcggcaccccctcggcgggagtcttgcagacgtgcgcgcagcatgggcacgcgcggcacgggaacgtcgagcatcatcgacaggtagaagtcgtggctgccgtccgacgggcaggccgccaacaggcccgaagcggaaccacgggccgggaagccgccatgacgcgcggcacgctcaagcgtttcatgcgctctcatggctctcctcactcacggaaccggccgactcctcacgccaacgggcctcaagcatgtcgcggcgcgtggccgcgcggcacaggccgaacgtcagcagacaggacgcggcgaaaacgaaaacgacggcgatcacgagtatgaggtgcatcatcggcccgcccccattgatcgcgcgagggaggccagcagacggaccacgagaagcacgatgccgacggccagacgcaggaacggcagcaacaggccgaaacaggccaccgcgagcaccacgaacagcaggatcaccaattccaccactcatcacccccgctcaccgaaggatgcctgagcatcgagaacgccgcgtcatcgccgctgagggcctccacgtcgcgcatcaacgcgtcgatctcgtcggacaccatgcccgcaccggcctcgtagccgcggttgaacacgcaatccgacggaccgccatggatcaggccacggttcaccgtccgcgcgggcgacgaagcgttccgcacgtcacgaagcgcgtcacgccggccgatcagataggcgaccgccatgacctccctcacggtcatcgacgcatccacggacagggacaacagggacatgtagtcccggaaattcgagcgctcctcgttatcgagggaacgcgcgccaacggtcacggtcattgcctcacctccgcgtgaagggaccagaaagcgaaatcccaggcatcgcgcgagttacggtcgcaccagcaacccacacaagccaggccgcaggccaccggcaccaaagcgaatcccggcagaagcagattcctcgcggcaagcagaatcgccagaaaaaccacgcacgacaacgcggccagcatccaggagacaagtcccagcagctcgtagcgccgggcagaacgtcgccaatacaaagattcggaaaatgtagacgccatgtcccgcgaaccattcgcgggggcgttaccatcaaaatcagaagtcggcacagcgacttcggttacactagacatttgtgcagcctccataatctaaaaggcaatgcgaacgattcgtttggggatcgtccgacattggatgtgttgcatacgcccggtttcgatgtatcagatcgagaccgggcattttcttgaaatgagaaaaaccactaacctcctcttctactgggtccagccatcaagtgattgccttctcgcaagagggcaggttattgatgccaagaacgaaatcagcggaaagtccgtagtggtcataaagaaacagcaagtccttctgctgccagcccaaatgcccgttctctttctgagaaagagtggaagcggattggcccatgtcggcagcaagggcagcctgagtcacatcgtgatccttcctccactgtttcatcggagaagccatatctactcttttcctaaagtctttagcctaactaatgtttttagaatacactttggtttgactaaagtcaaatcgcaaactagagtatcttaatgagataaaggtttattgatagaataggattagaatatgcgtacattattatccgcagatcaggcgaatcaggcaccccccgataccttgggcgaatacacagaacgtgtgctcaactacaatgtggacgcccggcgcaagcagctgaagcgaacccagaaatcactgatgcagccgatgggggttacaagcgaaggggctgtatctcaacgactcaaaggcattactcattggtctctgattagcgcggtcaatgttgcccagagcctcgatacaagtattgaaaaactacttgatgacagtgccatgaagatggagatcgaacgccaagcggtcgcactgcgcgttcaactggatcaaataaatcagatgacgggaaacaagaaagccaccggcgacacgccggtggcttcaggtgagctcctgcggctgggcttgaaccagcgaccgtccgattaacagtcggatgctctgccaactgagctacgcaggaataagttgttttgtgcttaagatttctctcgcgcacaagtcacatagtttacacgtacctgaggaaaatacaacttacatgcgtgtcatgcatgtcgcgcatgattcgttatcacatcgagaccttggtcaggggcatggcggagtcgattgggaagtcgggggcgctgggtgccacgccggcttcgaccaggttcacaccgagcatggcgaccatggcaccgttgtcggtgcagagcttgatctgagggatgcggacgtcgacaccgtaattctcgccgaattcgagtagtttggcgcgcagctgcgagttggcggagaagccgccgcccacgatcagcgtgttggaatcatactgccggcagccgcgcatggccttgcgagccagcacagtggccacggaatcggctagggaggcgcacacgtcatccactggaatctcatgaccggcggcctgttcgctttccacccagcgggcgacagcggttttgacgccggaaaagctgaaatcgtatgggtgtgcagcaccggccttaccctgggtcaagcccatcgggaccttaatggcatgcgggtcgccgttctggccgtgacggtcgatgtgcgggccgcccggataggggaagccgagcagacgggcaactttgtcgaagcactcccctgccgcgtcgtccagcgtggtgcccaccacgtcgatcttgcgcggcatgtcctccacgtgcagcaacgaagtgtggccgccggaaacgatcagagccagcgtgtctttggggaacgggccgaactgcagctgggtgacggcaatgtggccgatcacgtggttaatgccgtagatcggcttgttcgccgcccacgctagcgccttggcgccggagacgcccacggccaggcagccggccagtccggggccggcggacacggcgatagcgtccacgtcagccaacgtcatattcgcgtcggcgagcgccttggacacgcacggaacaaaggcctcggcgtgcgcgcgggaggcgatttcgggaatcacgccgccgtaccgcgcgtgttcctccatggaggaggccaccacattggagagcagttcgcggccgcgtacgatggcggctgcggtttcgtcgcaggtggattcaatgcccagtacaaccggttcgctcatcgtgcttctccgttcgtagtagtgttctcgttcaatgtgttcgtatcgttcgacgcacgttccgtgcccgcgccgctcgcacccgatgtcgttcgtgttgataccgtctgtgccggtgcaaagcccacgatcctcggcttcaggtccaagctcatggtgtacgcgtcaatgccttcgggctgatagtaccgtttgcgcaatcccatacgttcgaaaccgaagcgttggtacaaagccagcgcgggctcgttgtccacgcgcacttcgagcagcatgcgcgcggcgccctgccgcttcgccttgtcaatcagcgtcttgagcaacgcggcggcgatgccttgccgttggtgcgccttgcccacaccaatggtcatgagttccgcgtcctcgccgtcgtaccagaagccggcgtagccgcgaacaacagtctgttccgcctcgccaaacacgtcgagcagatatgtgcgggtgggtgcatccagttcctcgcgcaccatgttctcgttccacgcgccacggccgaatagttcgccttccaactgtgcgatggagtgaaccgcaagatcacgacttacggcagtgatgtcaacaatcatcgaatcaacccgtctcacgccttatcggcgccggcatggccgagcacgtgcttcagcgggttcggcacttcggcgtccggccggcgcaggtacaacggttcgaccggcacgtccctgtcgccgcgcagttcgcggctcagtgcggtggccgcaaaggcggcaagcccggctttcccggcatccaatatagatccgtccgccacggagcccagcgcgcgcaatccctgccagacggacgcgtatttagccgcgccgtggccggccacgtctaccacgtagctgacgccgtcacgttcgccgtattccgcgagcgccgcgttcacccgttcgacgatatgctccggatagtcgatgtccatctcgatccagcgtcgttccgcggcctcctcgtccggccggctgatactgccgtggttgagcgagaagtacagctgcttgcggcgcgcatcgttgacgcacagcgtaacatggcggtcgagctcgtgctccttggcctcggcgtccgagccgtcaccatccgactgatgcgagcccaagcgcggcacgtccgccagaaaatcgatgccgtcgaacaattcgtcgccatccaatacgaagctcatcatctcgccttgcgggtcgagcacgttctgtccgacgagcttggccccggtggcgaaggccagtgccttggcggccacgatgccagcgcgcaggccggtgaacggcgccgggccgatgcccacgacgatctcctcgatatcggtgggggtcaggccggcttcttcgaccgcacgcgcgatattgacctgcagcttctccacatgggtgcgcgaatcggtctccacaatgggctctcgacctacaatgccgaccgtcgaaccgaatgaggtgtcaatcaccagcgtgcaacccatgaatcctcctagtcataaacctctagagagtgtacatcgaggagtctatgggcggattatcgtaagtcgaacgactcccatcgcgcgcccaccggtacgaacgtgaccgtacgaacaccatcgctggtcagttcgccattcatgtcatccgacacgacggcagcttggtcgagaggccgatcgatatgaacttccaatcgttccggagccaatgcggtggccatctgctcgccccactccatgagcaccaccgtgttctcaccagggtcttcaagctcctcatcaagacccagagactcaagctcgtcaagcaaccgagcgacggcatcctgaccggggacataagccgaaccccccaaacgataggcatccacatgcaccagatgtgcgggagttccgtccgcgaatcgtccatcaagctcgcgggcgatggtaaacgtcggcgagacaataggctcggtaatgccgagtccagcgccgaatccttgcgcaaatgtggttttgcctgcgccaagaggtccggaaagcaacaacacgtcgccgccgtgcaccaatccggcgatacgcctgccaagatcttgcatggcttcgctagtggaagcctcaatcacgtgttcgatcatcaactgccctaccgccctttatgactgatgtcttcgatgcaacgctccagcgcatacatcgggtcgccaccgtttgtcttactctgctcatcggcccaggcgagcatgcggatgcagtgcgcaagaccgggagaagtccacccgccgagttggcgcatcgcatttttgagcacccagggattggttttcgcctcggcctgcgaaatcgtgccggcacgtacggccgatgccttggcgatggttctgagcttcatagccaatgcaccaatcaatgcaatggggtcggttccttgttccactgccgcacgcatcataacgatggcttcagcggtacgaccttcaacggctttgtccgccacggcaaagccagtgacctgcgggttggcggtgagatactgattggcacggtcgagtccaatgggattgtcctcaaaatcaaaacacaattgctcgcacatggccgcaagctcgccggttttgccgccaagcacggacacaagctgttgggccgccatcggctccaccctgcgcccgcgtttctcgaattcgccgagcacgaaattcaactgcgcatccggcttcttcaagtcgggcacgtccaccttgcgagcgccggccttggtcagctgatcgatgatcttgcgccctttgacgccgccttcatgctgacaaatgacgatgctggagccgttcgggtctttggccgcctgtttggtgtaggagaccagggtttcggcgaacttttcatcggcgttttgcagattgatgattttcactacggcggtgtcggaaagcagtgaaggactgacagcctcatcgaaggcgtattggtcggccgaggtggcgtcgagttcgatgagttcggcatcagggcgggcctgcaatgcctgtgagcacagttccttggttcgcatgccgttaaggtacgagtcgcctccgggcaccacggtcaccggtgcattcgctgctgttttcgccatgcccccatctcgccacacaggttggacaatgtatgccaatccggtctgttcctcgacctcatacgcgggcatcttctttcacgaagaatcaccggacaagagccgccgagattcctcgatccacaaagtcaggcgcacccgccataccgaaccgaagcgcataccgggaagaccggcttccggctgccgtacacgcttcacttgacgagtaaccagcaccaacaaggctcctatgcccagctccgccagcagtatcagcgcagcgccgaccacgccatctttccacggcagtgtggccatctcgttgcttcccagccacatcgccacacgttccatcaccaatgtgccccatgacgacacccatgcgaacacgcccgccaaccacggcatgcaccatgcgagagccaacgacatcaagccggtgatggtggacagccccacgaatggcgctaccagtaggttcgccggtacggacaataacggcaattccggttccatcagcacctgaatcggcagagtgaacagctgtgcagcgatggtcatcgccatcatctccgcaagactatgcggcaatacatgccccagtacgcggctcaaccgcccggcaaacagcactatgcccagcactgccgccgaagacagtgcaaagccgtaactggtcgacatacccggactcaccaccaacaccccaaccaccgtccagcacagggcgctcaacgcttgggatcgccgacccatcgcatgcgatgcggcacccatcatgcccatgatgagtgcacgggtgaccgaatcaccggggaacatcgccgcagccaacagcacgtacatgcttgtgatcatcactgcggtcagccgccggtccatcagcagccacctgccaagccgacggaccagtcccgccagcagtacaaaatggccgccggatacggccatcaaatgcatgattcccgatttgcggaaccggtcttcaagtatgttcgcatacgtggcgtgaatcggcatggattgcgaatccgtgccgacataatcctgcccaagtacacccatcgtcaatcccggcaccagcacacgaccctgatcgggcaattgctcggtaaccatgaaaaacgcctgctgcatgcgggatatcaacgcataatgtagcggcggatctctcacctgcgccaacggctggctgccatcaaccagcagccataatggcatgcggccatacctcgcctgctgcaaagtgcccgccagacgatacaccgcgcccctatgcatgcgcgcgcaatacgggtcatcggcatacacgcgcgctttggcgaccgagcccctatccgttcccccaatcatgatgacgctgaatcgcacatccgcctgacagtcataaccacgctggtccgaagcgaccacaggtgccgtcactgtagccgtaatcgcactctgcacgctggattgccgagcttgggtcattgccggatcatgccagacgatggtgtctgccgcaatcgtcgtcatgctgccgacgcacgccgccgcaatacagacagccagtacaccgggccagcgcatgcgtaggtgatgggccagcaatactaccaatatcaacaccagacacgccatgccgcccgggagcaaacgctcccaaccgatgccatccgagggcaacgcatcagcctcgcgctccgaccaccaggcaaacgcgctatgcgagcccagactcgccgcccacatggtcaaggcgaccggcagcatgcgccaatcgcggctcccctgctcccgcaacgcccaatccatgctcatctgactgtcacctgccctcgtatcttctccaaggttttcgagccaatgcccttgacgccgagcagttgatcaaccgaggcgtatcggccgattgtcttgcgataatcgatgatgcgctgagcggtcaccgggccaacacccgtaatggtttgcaattccgccagaccggcggtgttgatgtcaacaagcccatcatcaacggttacggcactgttctcatccgtctgtgtttccggaagttgctcaggatccggctcgacatcggtcatctcgtccgaatcggaggaagactgcggcctctgctgcgttgcattggcattattaggggtttcgacggcaacattcgatagcgcggccaaatgcattgattgttgaatcaacagagtcagactgatgcccagcgcggcaaccaataacagcacaacggccagggcctgatggacattgaacgtcagccgcggcttgtcccgtaaacgatggactgcaccatcggcagcatccgtagaacgtacgcctatcaaatcggatagtgattgtcggccgtttttggatcgagtggacgagcggctcgagacagccgctgccggaggaatatcaatagattttgcgcgactcggctgaggtggtggcttgggaggctcagccgccgctcggccgctggccccaaagcttgaccgaggaacgggcatggcttcttccgccctgcacaggtctcgcagtcggtggttggcatcgatggtcttgcggttacgaaaaacgcccatgaatccacgctgatagattcatgggcgtttgtctagctgaaatggggtatgtggttctagcttatgaagttatccacaatgagcgtcactcagcgggaacgatggagacgatcttgggggccttgacaatcaccttacgcggctccttgccgccaagacggtcggcgacggcggcacgcgcctgcttctcgagatcggccgggtcgatgtcgaccggcacttcgagcttggcgcgtaccttgcccttgatctgcaccacggcggtcacggtgtcgtgacccacgtagcgctcatcagccaccggccacggctcggcggacagggaatcggcgtggccgagcttgttccacatttcctcgcagatgtgcggggcgatcggagcaagcatcaggatcagcggctcgacggcggcacgcggcacggccttcaagccggtcaggtggttgttgagcacaatcagcttggcgatggcggtgttcgggcgcatgccctccatttccgcggtcacttcggcgattgtgttgttgagtagcttcagggtcttctcgtccggggtttcctcggacacgtgcacctcaccggtggtctcgttcaccacgttgcgccacagacgctgcaggaagcgcatgccgccgaccacgttgcgcgtgttccacgggcgggactcgtccagcgggcccatgctcatctcgtacaggcggaaggtgtcggcgccatagttctcgtacatgtagtccggggtcacgatgttcttcagggacttgcccatcttaccgaactcgcggttggcgtgttcgccgttccatgtgaacgtcggttctccggaagcgtccggctcgccttccacgacctcgtcggccggcacatactggccacggtcatcggtgtaggcgtaggcctgaatcatgccctggttgaacagcttgtggaacggttcggccgaatccacgtaaccgaggtcgaagagcaccttgtgccagaagcgggagtagagcaagtggagcacagcgtgctcgacgccgccgatgtacagatccacgccgccttcgtcacccgaatacttgttgtggttcggacccatccagtagtcgaactcgtccttctccaccatgtgcttggtgtcggtcgggtcgatgtagcgcatgtagtaccagcaggagccggcccagttcggcatggtgttggtgtcgcggtagtaggtcttgacgccatcgcccaagtcaagttcgaccttgacccagtcctcgttgcggctcagcggagcctccgggtcggattcggcgtccatcggatcgaaggtgcgcggctcatagtcaggcacgtcgggcaggttgatcggcagcgcggaatccggcagcagatgcggggtgccgtcctcgccgtagacgatcgggaaaggctcaccccagtagcgctggcgggagaacagccagtcacgcagacgatagctcaccgtgcccttgccgatgccggcagactcgagccaggcgttgaccttggcgatggcgtcgtccacgcgcaggccgtcgagggagagagcgtcgcccttggccgcggtggcttcgacgaaagaattgatcacgatgccgtcatgggaaacgaacggcgctttgccctcatagttggctaggtcgtcgccggattcaggcagaggcttgacggtgtagatgaccggcagtccgaacttcacggcgaagtcgtaatcgcgctggtcgccgccaggcacggccatgatggcaccggtgccgtagtccatcaggacgtaatcagcggtgaacagcggaagcttagcaccagtaatcggattggtggcgtacaggcccgtgaacagaccggtcttctcgccagcctcgtcaacgcggtccttggcggtcttggcttcagcagccaaacgataggccttcactgcctcgaccgggttggcatagccgcccttccaatcctcgggcacatcagccggccattcggcaggtacgttctccagcaggtgatgttccggtgaaacgacggcgaacgtggtgccgaacagcgtgtcgggacgggtggtgtagatttccatgtccttgctgccatcggcggtggccacggtgaagtgcacggaagcgccgtgggattcgccgatccagttgcgctgcatgagcttgaccttctcaggccaattgatgccatcgagatcctcgatcaggcggtggccgtacttggtgatgcgcatggaccactgacgcagctcacgctggaaaaccgggaagttgcctcgctcggacttgccttcggcggtgacctcctcgttggccagcacggtgcccagacccgggcaccagttgaccggggacttggagatataggccaggcggaagtcgttcaaaatgtcctgctgttcggcctggtcgaggtcggcccacttcttgccgtcggacttgtgacctggaatggccttctcgccggattcaaacttggcaacgagttcggcgatggggcgtgcggagcccttggaaccagaggggttggtggcgtcctcgtcataccaggaatcgtagatgcgcgagaagatccactgggtccagcgcacataaccggggtcgatggtggcgaaggtacggcggttgtcgaagctcaggcccatgcggtgcagctggcggctcatgttggcgatgttcgcctctgtggtcacgcgcgggtgctggccggtctggacggcgtactgctcggcaggcagaccgaaagcgtcatagcccatggcgtgcaggacgttctcgcccttcatgcggtggtaacggctcaccacatcggaggccagatagcccagcggatgacctacgtgcaggcccttgccggacgggtatgggaacatgtccatggcaaagtaggcggtgcggccttcggcgttgcgacctttgccgtccttcagatcgccattgacgttggcggcccagaaggtgcctttctcatcccagatcttctgccatttgttctcgatatcctgcgccagcgcggcgttgtagcggaagttgggctcttcggtttgcgtgctcttctcgttgtcactcataaatcagcaaggtagccgcgcaactggacacgtcgtcaatcgttattcagcatccgagacgatggcctgcgggtcgacttcccgtgtgaccgtaagccgagtttgccgcttcaattcagcccgcgcggactcccagctgccatctgcgatcatgtccttgagcgcttccgagattttctgcgccaactgtggagtcccttggcttacggcgataccgtattcgaccgagccctcatcctgcagcacggtcatatattgcgggccattggcctgtcgcagaccggacagcaccgccatgtcggaggcgatggcatctgctgatccgacctgcaccgcggtgacgcattgcgcgtagctgtcccgttcctggaattgggccttgggatggttcgcgcggaacaggtcggcggtatcatcgcctttcactatgcacaccatgcggtcggcgatgtcgccgatgccgccacccgcctgcgcaaaatcagctcggtcctcagtcctgatcaacagacccacaccagtgcgcaagtagggtccggcaaaatccgcttctgccttggaaccatcggtaatcgcccaggatgcgacgaccatatccacttgcccgttgttcagcatcgacgcccggtttgcgggccgtacctgcttgaacacgatttgcttgttcgcatagccgagtttggccgccacatatttggcgacgctaatgtcaaatccctcataggtgccgtcatgccacgcgcctattgccggctcatccgcagcaacgccaattgcaagcgttggtccttccggcgaaccgttgaccgtggtcacctgaatctgaccacatccagacagcatcagcgcgaagcccaaagcagcagcaatccccgcaaccagacgggtgcggatgcggcggcgcaaacggaaccagttggtcatggatgaaccggcttatttgaacatgcgcgaacgggtgaggaaccaagtgaccagaatcgagagcgccaccgaaatgacgacaatcgtgatgaatccccacggcttatcgctgaacggcatgccgagcatgcctccttggaagttcatgccgtacatcgagaaaatcagggtcggaatggacaacgtgatggagatgatggtgaagatgcgcatcacattgttcaggttattggacacgatcgaggcgaatgcatcggtcatgttcgcaagaacgccgctgtagatgttggccatctcgatagcctgtttgttttcggtgatgacgtcgtcaagcagatcctcatcgtccggatactgcttgattcggcttaacgtggtgagcttctccatcacgatttcattcgatttcagtgacgtggtgaagtacaccaaggtcttgctcagctccatgagcatcacgatttcacggttctgcatggagtggcgaagcttcaattcgagcttgtcgctttcgcggtcgatgatacgcaggtaacgcaggtacatggtggcgttgcggtacagaatctgcaggatgaaccgcgagcgcatgaaggtgttgaagccgcggatggtgccttccatgaacggatgaagcacgggggtgtcctgcatgcagacggtgatgatgagattctcggtcacgataatcgacaacgggatggtctcataccagtcacggccaccgcgttcttccacggtgggaatatcgacgatgatcatcgtgtattcgtcttcgacatccacacgtgaacgttcctcgtcatccaggggggcgcgcaggtcagccagatcgatgccggtttgcgaggcgacggtggcaagttccacatcggtgggttcactgagacacagccaagagccgttctccggtttctcgatctgctccacttggccattgatcgagctgaagattctcagcatgtcgtctcacccgcctttcgcgctttcctactgttctatcgctgtacggttccaaaccgagaatagtctaaacctaccgtttgaatttgcggcgaacgcgttcatactgtgttccatgtccccacgccaacagccgatatgcggttgtgccatgcggatatggcgactaacgtatccgctcaccacacaatcggctgccagcctggcatgtgcggtccgcgcaggtcggcgggcccgttctcccagtctgcgcaatcggcaatggcgggcgccttgttgtattcttccagctcccacagtggctgctccgtcgattggccattgacgctatgacgcactttcagtcggcaccaacaggcgttgcgcatggcaccaagcgcgttcataccgtcaggatccagatcaagcagattggcaatggtggcggtaatccatgagccatgggtgaccagcataagcgtggtgggcgtgtcatccgcataagccgaatcacagaccaatgcgcgcactgcgtcggctccgcgcttgccgacttcggcgcgactttccaccccgtgtttggtttccccgccagtgtggtgcttccaggaggcgtagtcctcagcggccacggctttgatctcagcgcgggtcaggccttcccattcaccaaagctgcgttcgcgaagacggcgatcgcagaccaccggcaatcccagcacatctgcaaaggcgtgagcggtctgttgcgcgcgaaacagatcgctggtcaataccaccatgcgccggccggctgccggagcttcctcatattgatgaatatcggtacgttccgcggcatccggtccgggctgagcgatggcttcgggatgagaggccagacggtttaccttggcccagtaatagcgtgaggcgagcgcgaatccggtttggtcgacctgccattggcctacgatgtcgagcggcacatcgatttggccttgcaaacgatgttcgagattgtattgggtgcggccgtggcgcagcatcatcacttcatcaatcattggcctgtcacctcgtttgttgcggatgtctgacgtattcatctcaccatgacccctagaatggccgcatggagatttctgagtcgacctgggcgtttatcgccaagcatcgctgtgaggatgtgcgcgatgtggctttgcatgccaaacgtagcgatggcattgatctgtcgtttgccttggagcaaatagctggctggcaacgcgcttcggtgaaattgcctgattgggcggcttgcgatggcctgattttccctccgcaagtgcctatggaacagtgttcttcacagttcactgcccagtacaaggctcggctcgcccaacatttgctggaaaaccagctcgctgatgctgatgcatccgactcgacttctctggttgaccttaccggtgggttcggcgttgatttctcgtatatggctcgggtgttcgaccatgccacctatgtggagcggcaatccaatctttgcgatatcgcccgtcataattttccgctgcttgcgcttgctcacgccgaggtcatcaatgacgattccacggcggtgttgaggcagcttgccccggtttccatgatttttctagatccggcgcgccgtgacgatcacggctcacgcacgtatgcgattgccgactgcacgcctgatgtactggccttgcaggacttgttgcttgtcaaggctcccctcgtcatggtcaagctctcccccatgcttgattggcataagaccgtcaatgattttgcgggcgcggtgcacgaggtgcatatcatctccaccggcaacgaatgcaaggaactgctgctcgtgctggagcgcgaacgctgcgcggcgcctcgcgtggtatgcgtcaacgatgagcaaatattggaatatgaggcgaaccatggtagtaccgaggatgccgacggtattgcgcatgccagcagtgatggcgaagagcccttggccggcactcgcacaggtgctatcggagccgaccgttggcagtatctttatgagcctaatgcctccatcatgaaggccggttgtttcgctgtgatcagccaacgattcgacgttcacccgattggaccgaacagtcatctcttcgtatcagcaaaacccgttgatggattccccggacgatcgttcgccatcgaatcaatcgccacgatgaacaaacgggagctgaagcaggctttggccggacttacgcatgcgaatatcgccgtgcgcaacttcccgctttccgtgacgcaattgcgcaataaactcaaactcaaggacggcggccacacctatctgtttgccaccacggatgcgcaaggccggcacctcgtcctacgcacccagaaacaataaagctccctctgatgagggagctagctcgcgaagcgagactgagagagaacaggtgtagtctgccccagcggaaggaaccaatcagtccttggcgatggtcttgccggcggtcggaccggaagccaggttctgaatttcggtgacttcgagcaccggaatcacggccggcttcttggtgcccttttcttcggcgaccttgacctgctcgttgtagatatcgtcgtcaacgtgcagcaccacgttgccacggaagcggtagccctgcttcttctcgaggttggcgaaggcgatgaccagcggggagccgttcttgaggttctcgtagtgctggccagcggtgcgctcgtggtaggcaatgtgggtgtcgtccagcacgaacagggacatcttcgggccgagatccagttcgccgtccttggagatggtggtgatccagccgaggttgttctggatgaattccttgatttccggagtgatgactgccatgtcgaatcctttcatgggtatgagtacgacgtgttgttccactcttaaggatagtggttttcttcgctgccggcacggatgttcgctgtgagtaacctcaccttcgcactgctttcattcgccgttcaccgccggagcgcaaggctcgcagaatcctcttttttgactggtagttcccgtaatctgaaagccgagagagccacaagttttccgtttttctaaggtgagtgtgtgatgggtttggtcgagcgctgcaaccggctgcgtagtcgttggtcacgtagttttccgccgaatctcgcccgtctgatgttgctggcctgcgctgcgctgtggggaggcagctatctgctcgccaaattcgccatgacggcgatcccggcgcaatggctgatggcccttcgcatgttcggcgcctgcatgtgcatgctggctttattccacaagcacatcgtgccgtacctgacgccaaagatcatcgtgccggcgctggtggtcgggctgacctattggggcacgatgatcacgcagaccattggattgcagaccatagaaccgggtcgcagcgcttttctgacggctgcctattgcgtcattaccccgttcgccacatggattatctccaaaaccaagccgagagccatcaatctggtcgccggcgtgatctgcctgaccggcgttggtttcgtgtcgttgaagccgggaggctcgctctccttgagttccggcgactggcttaccatcgccacggcggttattttctccttcaacctgacctgtctgggcgtctataccaagcgttttgatccgattgccgtcaccttcgtgcaatttagcgtggccggaatcctgttctttatcggcgcgttggccaccgaacccgcgcctgatgcaggatggctggcacctccggtggtggccagcgtgttgtatctgttccttggtgccacgatgagcgcgcaaatcatgcaaaatatcggcctggcccacgtgccggcatcgcaagcgtcaatcatcatgtgcacggagagcctgtttgccgtatcgttctccgcactgttctggggcgagcgcatcctatggagttcgttggtcggttttgcgctgattttcgccgccgtgctgatgtcggtcatcaaaccgaccaaatattcgctgcatcgtaactaattgcccaatgccgtcactatcatggtgacgtttgcggcgtgttgtgtcgccgtcatcatgaggaggaaatcagcatgaatctgcttgagtccatgcagaaacgccatgccgtgcgcgattacaacgacgaaccgctcaccgcggaacaggtgaatactcttgatgaggccattgccgccgccaacgccaagcaaggactcgatattcaactcatccatgatgtcgatgacgcattcgggggctgcccgacccactatggccggttcaagaatgtccacaatcttattgcgctgattggtactgactcgcctagcaatgaggccatactggacgagaaggtcgggcatgccgggcaattgctggtattgactgccgtctctcttggactcgacacctcatgggtggtactgcatgagaccgctgatcatgacggcgcgtggacgctcgccgaaggggaacgtatgcccgccgccattgcgctcgggcatggcaaccgccccggccggccgcatcgcagcaaaccggctaaggaactgggagccgtagaaaccggcgattacgcgaatgcacccgactggttcaagcggggcgttgaggcttcgatgctcgcgcccagcgcgttgggcaagcagccgttccgtttcacgctgctcgcggacggccgcacggtaagggccgaagcattggaaggcgtacagccggaaatcggactgggtatcgccaagctgcatttcgaattggcggccggcaccgatagcttcgtgtgggcatagtcgttcaatcgtgttgtgccggttgagcctatgacgaaaccggccatatagcgccacaatacgcaacgcgtataggctctatgtgaaggttttgcagggcacttgtaagcatttcgtcactttcagagggccttcagcaaccttcaagcacagacatctaccgtcgtatgcgtgaagaagtttttcgaaggtctttccatttcctcgatcgtggccggagcccttgctgccgtcacctcattcctgttggcgtcgaaaatcggcatcgcaggttcggtgattggcgccgcggccagctacatcgtgtccgcagtcgccaccaacatctaccaaaacgtgttgcaggcttctggggaaaagcttcagagcgtgggctccacggataatgacgccgccgagcacggcgaatcggatgccggtagcaatgattcctcacccgcatccgaaacagaacttcctgcagcctccggcgatgcggcggatgcccaacagagcgacgatatcgagcaacccacgcgggtcgaagcggcagccagcgaaaatcccgaaaacaccatggttgctgcagccgcggcaggtgaaactactaccagcctcggcaccgcttccacacccgctgcacgtgaagcgaccaccaccctcagcaccgcctccgcaccagctgcaggccgtcgcacacctcgcgagattgtttctcgcccgactgcacagcgttcgcgccacacgtattccgtcaaggaactgcgcgcatcacgccgcaatcccaagcgcacagctgttatcgtaaccgtggtatccggcctgttggccgttgccgtaacagccggcatcgtgctgctcatcacccaaggcaacggcacggacagtgtagtgcgaaactggatctcccccacagtcaccacgccttcgcccgagcagaccgagtccccatcgactcccgaccagcacacgccaacggacaacaccaatacgccgaagagcaacggcaccacgaccgagaacgactccgctccctcagggtcgtccaactccgatagttcgtctggttccaccgattcgtccggctccaccggtactggctccggcaacacgaataccgaatccggcaccaacagcggcacggagaccaacggcaacaccaattcaggaaccggcggaaactccggctcgaactcgaccggctcagatgcctcccacggatcggggtcttcaacgaattcgggcactaccggttccagctcaacgggttccggcaacagttcgacaggctccaacagttcgtccggcaacagcaccggcagttccaattccaaatcctccagctcgagcacaagcagcagcgccggcactgatatcgacgtcataggcgaatgacgtggggcaatgcgaaacttggacgtatgactacagttatcatgcgcacctgcgaaggtgacatgcgcatgatgcttcttctttgggatgtgacatcaggaaacagatcactgaagattgttgaaattccagtcaaaaccactccaagagccctgaacaatcccgattttcccgaaagatagaatccccgcggccgaaggatagcgccttattcaaaatcaccggcgtaggcaattactctttcttctaatggtttttcaagaagtagagaaagacaaaacaaccgatggccgatggagacaggaaaagacggaaatggggatgcgtcgtcgcctgcaaggacgcggacggaagcatcgtctcctggtgcactcagaaccacgctcttcacatcctttcgcgtgtcttcaactaaagcggtttagaataatgctgttcccttgatatgtatatccttcaaacaaagaagttgaaattatgacgaccaccgcgataccgaagtcggtctcggatttcatgcagcacatcacggacctgtgcggcaccgaacacgccgcctgggccgagaacttcaacgcctgctttgccaacaccctgaccaccacggtcaaacggcatgacgacggtaccacattcctgctcaccggcgatatcccggccatgtggctgcgtgattcgaccgcacaattgcgcccgtatctggcccttgccgccgaagacggcgacattgcgagcctgatcgccggtctggtgcggcagcagttccgctacatcaccatcgacccgtatgcgaacgccttcaacgaggagccgaacggcgcttcctgggacaaggatgatcagtccgacttctccagtccctggctttgggagcgcaagtacgaggtggactcgctgtgctaccccattcagctggcttggatgctgtatgcgaacaccggcaacaccgatcatttcaatgacgaattcattgccggcgtcaagaagattcttgacgtcttcgagaccgaacagcatcacgagaactccccgtatttcttcatccgcgacacggacatccccaccgaatcgctgagcaataacggcaagggttcgccggtggcgtacaccggcatgacctggtccggattccgccccagcgatgacgcctgcacctaccactatctggtgccctcgaacatgttcgccgcagtggtgatgggatatctggaacgcatcttcggcggggagatactgcatgacgccgatatcgccgcacgcgccggcaagctgcgccgcaccatcaccgaaggcatcgaagcccacgccaagacgacgaaccgcaacggagagacaatctacgcgttcgaaaccgacggtctgggacacgtcaatgtcatggacgacagcaatgtgccgtcgctgatggcggccccttacttggggtactgcgcaccggacgatccgacctatctggcaacccgacgcacgctgctcagcgacgaaaacccgtactattacgagggcgagcacctcaagggcatcggctcgccgcatacgccgccacgatatgtgtggcccatcgcgctgtccatcgaggcgatgaccagcgacagcaaggatttcaaggcgcatattctcgaccgtctcgtggccaccgacgccggtacgcatctcatgcacgaaggcatcgacgtggatgatccaaccaagtacacgcgcgaatggttcagctggtcgaatatgatgttctgcgaactggtcatggactatttcgacattcacgtgaaacactaagacgtgtccgccgcatgctcattgcgcacccaccgcatgttctcattaaggaaaggaacaatcattatgaccaataacccacgctatgcactcggcaccgaagccaaccgcattttcatggcttccgaaacctacgagctgctgaagttcggcaaaggctttccagcgccgaacggcggttccggctggctgaacgccgacggcaccctcgacccctcacacggcgtcgaaacgtggatcaccagccgtatggcccatgtgtattcgattggcgccatgctcggatacccgggtgcgggcgagctggtcgacgcggcgctcaggggattgaccggcattctgcacgatgacgagcacggcggctggtatccgcaggtgtttgccgacggttcccatgcgccgggcaaggtctgctatgcgcatgccttcgtgattctcgccgcgtcctccgccctgctggccgggcgtccgggtgccaaggaactgctcgacgaggcgctcgccacatatgacgagcatttctgggacgacgagatcggcctggccgtcgacacctgggacacggcattcaccgcactcgacccctatcggggcctgaacgccaacatgcataccaccgaggcgttcctggccgtggccgacgccaccgggaacaacacctatcgcgtccgcgccggccgcatcatcgaccacgtcatcgaatgggcggcacacaaccggtggcgcatccccgagcatttcaaatccgactggtcgttggacctcgaatgcaacgccgacaagaaggacgaccagttcaaaccgtatggcgccacgccgggccatggcatcgaatgggcgcgcctcatcgtgcagtgggcgctgagctccttcgccaaccgagacggcgcgcggccctacatcgacgccgccgagcacctgtttgcgcgggcggtggacgatgcgtggaacgcggacggcgcggaggggctcgtctatacgaccgactggaacggcacaccggtggtcaccgaccgcatgcattggacggccgccgaatcgttgaacaccgccgccacgctgcacgctgccaccggcgaggcacgatacgccaactggtacgccacgttcgcccgctacgtcgacgagcacgtcatcgaccacgaaggcggatcatggttccaccagcttgacggcgacaatcgcgtgatcggcacggtctggccgggcaagtccgatctctaccatgcgttccagtccacgctgattccgttcctcgacccggctgtgtccattgcgacggccgtgaagaacgcagaataatcggcgataagtgataacgtccgatatttttgcgcaaaaaatcggacgttatccatcatcccggatagtcgaatatgatgcaacacctcgcctgtgaaactcatctttcagctgggcaacgatgatattgtggcgtgactcggtgcacaacatagagcaatctcgacctcatgcaatcgcagtacacgaccttccatcgcatccaacctaattggggtcggaataattgtcagaccatgctgtcctggaatatcgtaaatttcgtttccgggcatgcgaacgcaccttaatgattacgctgattgacggattggacaagtcaaacggccttcgtcccactcaacaggacgaaggacatagccggctcacgccaaactggtgctgtcacgtacaatcaatttcggggtaagtatcttacgatttccgctcaccggctccccagcaagcaccttgagcagcaggttagccactttagtgccatatacgccagcgtcacgatgcacggatgtaatcgaggggtaaaccgcctcgcatacaaaactgtcttcgaaactcacgattgcgggaatactatatggatatagacgtttatctccatcactacttttacgatcgcggttcaaacagtccgcagcaagcgcatgtagactggcggccgcaagaatttcattctcgtagatgaacgctgtgggcgcagcaagctcccccaacaatcgcaatgtctcgcccaccgccgcattcggatcaaaattcgtgaacgacacggatgagaattcaaggttgttaatctcggcaaatttccgaaatgacatttctcgatcacgagaataatccaacatcggatcgccggatatatatgcgattcgcctatatccccgtgacaacagatgatcaagaatcgctcccatggtcttcgaatcatcaatcgacaaagacggtaccagattgcttgggtcgggaccgccagcgagtacagcaggcaaacctaattcagcaagcaatttcggtctaggatcatcagccttgagatccaccagaattacgccatccacccgtttccgagacgcccaatcacggtatacatccagctcctctttagtggaagagcaaggacgatacagcaagccataccgttggcgacttaatgactcatgagcgcctgccatgaaatgcagcatgaacgtctcttctttaagcccctgcacagaacgagatggagcgaatcccacagtcatggttttcgaggagcccaatgcctgcgccgcatatatcggacgccaccccattttcgccgcagcctccttgaccctgcgcttggtctcagcggatactccgggacgatcattgattgcaaaggaaacagcagtctgggaaattcccaactcatcggctatatctttgagactgacccgctgcatactggaagttgctccactagaggtggatttcatgacattcctccattctgtgaagcttgacatcgaacatcggacatccggcatggcttattcgtataattctgtcacatcaatgaactgataacatacatttcatcatattgcgacagcgaaatggacgccaactgttggcacactcatccggccaacaaagatgaaccaacgaccgatttagtctacagactcgaatgcagggtcggagacagcggaatagaaacgcgctgcatgaggagacgtatcccaatgcaattcggtaattccccgttgtctgagttcaccgtcatcggctgcaacagtcgacgtgacaacagtcggtcgcttgcctgcgatttccagcttcatccacaggtcacagaccgaccctcccggccccagcgtgctacggttaatcgggttaccggttccattcacgtccactacaatagccaccgatttcgcctcggcaggccttgcatcacggtattgtgtcgcgagctcaccatatacgcggccaatcggcttgactttaccgttctcatcgaacaaacccaatgaatattcaagggacggaaaatcggccaaatatgatggcacatcatgcgagcaccaccaagtgatgccccacagattcgggcaatcaagagctttggtaaccacacggcgacaaaactccggtgtgtcttcagcggacaatacattctccggtgcaccaatctcctgcagccaaactggacggttgaccggtccgaaggctttggcgagttcagccaagtacaatgcgtacgcgtagcattcttcactccgcgccccatatccttgtccaacaccattgaatacccacgagtgaatggtggtcaaatcaccttttgtggcagactgtaccggtgtgaacggatgcccgtccaggaaccaaacgccatcgttgacgctgtacaaagaaagcacgccatcccgtttggcagccgatagcaactcatcgagccacgtatcaatctgctcggatgaggcagacatcttggccggatgaggccggtcggacaactggttgacttcattgccgagcgtcaatcccttgaaggcatcctcttcggacagttcatcggtcataatcgagaccaactcacgttccgattccacagcactcggatcagtgaacatattccctttatgccatgtgacgagccaactgggaatgaagtcaaagctcgacaaatgcccctggaacacatccacataggcatcgagcccatgctcaccggctatatgtaccatgcggcgcacgtcagccacacccttacgattaatccatgtccggttcggctgcaggtacggccacacaggaaagatgcgcacgtgatccatacctaaatccttgatctgccgtagatcgttgtcgatactggtccagtcgggatcaagccacgaatgaaaccatccatgggacggagtgtaatctactccaaacttcataagaatacctttcggtcagcccttgatgccgccctcttctacaccacggaagaagtagcgttggaaaattaggaagaatacgataatgggaacaagtgcgataaccgtgccggccgcaatcaaacggggatcagaaacaaactggttcttgagcctgttaaggcctacagtcaacgtataaaccgaatcatcaccaaggatgatcaatggccacaggaaatcgttccatgcaccgacgaacgcaaaaataatgacgacggtcatagtgcctttcacctgaggcagacatacattaaagaaacgctgccagatgctggcaccatcgactttggcggcttcctccaactcaactggaataccagagaacgcattcatcataagcagcacattcatagcactgcacaggccaggaagagctgcacccaaaagggtattctgcaaacctacggtcttgacaatgaggaactgggaaatcaatagggtctctccaggaatcaacattgcgctgaaaatcagcagtacgacgatcgtcttgcccttgaacttcaggcgagccagtgaatagccagcgagtgtggctccgatgacattgccacacaccgaaatggctgcgacaatcaaagaattcttgaaataggacaacaccggaatcgtgttgaacgcctggataaagttgtcgatagtcggatccttgggcaccagatacggagggatggcatagatatcatcacctttccccttaaacgctagagtcagttgccatagcagaggcccgatcagaatgagaaagaacagggtcaacagcacatattgcacgaccttgttgacttttttacctctcatcgctatcgacctttcgttgcacgaagaactcaacagccaccagactgccgacgattatgaataccaacatgctgaccgcgccggcataaccgtacttggcattcaaaccagtgccatagttcttaatcagcatcgtcatggtcacgtccttaccgccgacgccgccagtgcctcctgtcaagacataaatctcattgaacactcggaacgcggcagcggaagacagcaacatgatcaacaccatggtggagcgcactcccggaacggtgacatgcaggaaacgacgaaccacgccagctccatccaattcggcagcctcatacagactgggatcgatattggccaatgcagacaagtagataatcatgtaatagccgagacctgtccagaccgtgataagcatggcgctaaataacagcagccaacgatccgtgaggaacgggacagcggctttgatgaagccggcaccttgtagcaaagcattcaccaagcctttctgactcagaaggttggtccagaccaggccgacgatgacggtggacactacgaccggcaagtagaaggatgcacggaaaaaggcaagaatcttggaattcccggaaaccagtgctgcaagaatcaatggcagtatcaccatgcatggaaccacgcacaccacatacagagaggaattcagcaagcctatatgcacagactcatccgaaaacatcttctggtattgttccagcccgacaaaatgaccgggattggagaaagtagcatcggtgaacgacagacggaccgtattgataaaaggggcaatgacaaacgtcaacgcgatgagcaacgcaggaaccacaaacagccagcccgctatgccattgccttctttgatacgatgagcgtcatccacctcccatgccgtttcatgggaagcgccgccacggcggccggccttgccggccgccagcgacttcttgccggtaatcgacaaagtcattacttcaaatcctcattggcaaccttgactgcggcatcaagagcttcctgcgcagtctgctctccttggatggcacgggcaatctgctcacgaagaacagtcttggcattctcggagaacggcccaggagcaatgaaccagttatcgtctttcaccgccttggaggcaagggcaaccgcctgatcctgcaaggaatcaccagttgggctgaatgcttcgtcgtcgacagcacccgcaacagacgggaaagtgtgggacttagtgcagaattcggtctgattctccttattggtaacgaacttagcgaatttcatggccattcccttgttcttagtggtcttactgaccaccagcgtttccatggcaacattcatcttgccgccttcaccaagcaatcgctcggtaacgccaagattcttatacagctccggggcattagcctcaaaatctgcaaccgaataggcggaacccgccagagatgccacgctgccctgcttaaatgcgtcgccctcaccagtccaagtattattcagcgcttcggcggacagtgctttctggttgtacatatcgataaagtgctgaacaagttcaacaccctttttgtcgttaaaagtgaactcggtttggtcatcattcatcaattgcacgccatactgtccaaaagactccaatgtgggcacagaagccaccatgctcacggaaccgttgcagttctcgcccatggtcttggccgaatcgaaccattcatccatgtcagtaggcagatcagcaactccacaccgctcaagaacggctttgttgtagtactgaacaccagaattgagataccaaggataggcataagcgccttcctcgatattatcgccctcaaaagtcacattaccccacgatgaagcagtgaactgggattctgcatctggatcctcccgcgacaggttcagagtcactccagctttggccaggctataggcaccagtcgggctcatatccacaacgtcaggcagcgttccagcggctgcgtcagcattgattttatcggtatagccgtcggcaggctgatcaatccacttgaccgtgacgcctggattctctttctggaaagcggcaataagatcgttgaagtacggggtatatgtatcatttttcagattccaagtctgaaaagaaatttcattgctattggaggaagtcgaattaccgcaagcagccactgcgaacagcatagaacctgctccaacgacagcaatagtctttctcatggaaaacataccgtttccttctttcttttcgtagaaaacccttcgcccttttgcgaacgagaggcccttgcacgccatgcctcaacaaatcaacatgaagctagtctgttgagagtcacaattattgaggtctcatcgctgagactaaaccgttttagtttccagccaaccgcgtatctgttaactaaatcggtttagtgaaactataacacaatcgaaacatgcacgcaacgaattcatccgcgcgtgtcgcattgatatctgcccaacgggatcacccccctcttctcatacaacaatgggccacgcccaaccgtatggcagagccggtctgctccggttccattacggttggacacgacccaaaatatcgagcctaggcccaatatcccttatcggcgaatacgcagcatggcgagctggaacggcgccaacgagacgaccgcaccgtcggcaggcatcggctcgtcgccggcgagcgagcgcggcaattcggtgtccagttccggctcctccatgagattcacctcctgcacgctggccttggcatcggcgagagcggcgtcaaggcgtagtgcggccgtggcattgccaccggcggcctcgtacaggcgcacaatcagatcgtcggaaccgtcatcggcgagcttgacccagtccaatacgatggtgccggtgacgtcggcgagcgagaccagcggggccaagtcaggcaactcccctattacagggctgttgagtcgcgccgcctcgtccagcactgcgttcatatcggcgtcagcgaccagagaccatgcgaaggagtgcgtgccttggtcggtgcgtggatcggggtacagcggtgcggacaggagcgacagtcgcaccatggtgccgcggccggcgccgtgcgccgcggcggcgtggatcggactgacgtcggatccgtacgtggaggcgttgaccacagcggcggcatagccggcgtcggcgatacgtacgaagcggtgtgtgcagctttcgaatttggcatcatcgctgcgcgtgttcttgttgatcggacgttcgaccaacccgtactggcattcgtactgcgcgttcaccgcctgcaccgtgaccggcatatccaccttgaggaacttctccacggcatgccaatccacgtcggcggtaaaatcaagactgccggaccccgggcgcaacgtgatgacggtatggatctcaacaccgcgcgcacgggtgacgacgtgaatcgcagccgagccgtcgggcatatcttccacatgctcgaccatggcgtcggtgagcgtatcggcggcgaggaacgcatcacgctggatatcccatgcatcccaatggaatggctcatccttcaacagctcatagcgccccatgcggacaccggatggcacaagttcacgacgcaaagcgagatcgatcagggatgagacggtgccatccgcctcaatacgcacacgaagacgtccgttgtcaagtatgatggcgtttccgtcacgctcgacggaaaccggaatgacagactcttccacagccgttccaccaccgtcacgcacagcccatgaatactgcggattgcttgcatatggcgcaatcacggcatgcttcaccgtcgctatgcctggatcggcctctttaacggcctggccggcagccgcagcgatgtcacgcagacgtgcgatgtcacgcgcgtattcctcgcgtgcctgacggtgcacccatgcgatggcggaaccgggcagaatgtcgtggaactggttgagcagcagggtcttccagatacggtccagttcctcacgaggatagacgtaacctgggttcttgatactggccacggcgcacaggtattcgacgacacgcagcattgactcctcttggcggcaaccacgcttcatatcctgctgtgcggtgagtgtgcctcgatgcagttccaaatacagctcgccatggaagaccggtgtctcgccgcgggcatcgtcgacgatatccttgcgcacgcggtcgaacagctgatcaggagtaccgaaatcgattttcggcgcaccggcgagatcatggtcacgccggatgcgtgcggtcatctcacgggtggggccgccgccgccatcgccgaaaccgtagagcaggattgcgttgcgggaaagatccttgtccaggaaattgcgctgcgaatacatgagctcgcgcatgctcatcgacgagcagtaggtgtcagagggcgggaaatgcgtgaggatacgagtgccgtcgatgccctcccacatgaaggagtggtgcgggaacttggtggtgtcgttccacgagatcttctgcgtgaggaaccagtcgaatcctgcacggcgggcgatctgcggccaggagccggtgtagccgaaactgtccggtagccagatgccacgcggcgtgacgccgagatgctccttgaaatatcggcggccgaacgtgatctgccgcaccaatgattcgccggaaggaatcatgttgtcagattccacccacatgccgccgaccgggatgaaccggccttcttcgatgcgccgcttcattcgtgcgaacaggtcgggatgttcttcttccagccatgcgtactgttgggcggaactcatcgcatacgtgaagtccgggtcttcgtccatcaaagccagcacgttggatacggtacgggccaccttgcggcgtgtctcacgcaccggccacagccatgcggagtcgatatgcgcgtggccgatggcaatgtggttgattgcactggatgcagccggttcggcgagcacgccggcgagcgccgcacgggctgccggcacggtttccaagtcacgttcatcgtagatgttcaaggagcgttgcagcgctttggcgagctgccagtagcgcgggtcgtcgtctttgagttcgcgaatcagggaagatacggtttccaagtccatgtcataggcaaacacgtcttcgttgaagatggtgatatccatgcgactcagtgtgtatgggaagtcacaggtgccggtggcctcttcgccgagttcggtgggtgagaacggggtggggccttcgacgaatgggttggcggcggcttcgatatagacggtgaagtcgccatgttcatcgagttctacagtgctgctgccgtccgcgtagacgagtggaatccagtggttgcgtgggttcgcggatttgatggcggtgccgtcggcacgatagacgagtccctcggattggaatccggggccgcggtgatcgagccagccgaggtctaccatgagttcgacttttcgtcctttgaccgccgccatgtcgatgtggccgttcacctcgaaccatgtggtgccccatgtggtgccccagacgccgggaacgcggaaaggttcgaagggcacttggccgttgcgcactttggctagaaattcgctggagggcaccggttcgccgggattgtggaacgagcgcaaggtgcatgcggcaagtgtggtgtggatatgcggttcgacgcgctgctgcatgacgcggtcgcagcgctccaactgctgattgggcagaagaaacatggagagttctcctttgctgtgtctggtggtaggggtgggagtcatggtaattggagaaaccgtaatacgacatacttctgccccctcatggtacaaggaggcagaagcgtcaggcgaaaattcagcgcgtgatgcgcagggtggcgagctggaacgggccgaagtgcagtgtggcgccttcggcgttctgtgtaccgtcttgcagcgcgaccggcaggtcggcggccagatcgtcgccttccagcacgttggtctcatgcaccgaagcgcctgcgagcgccgggcagacatgcagcgtggcatcggccttgccgccggccgcctcataggcacgtacgatcaggtcaccggaaccatcatcggccagcttcatccagtccagcaccacggtaccattgacggactcgatcgaggcgagcggcgccaagtcgggcatgtcatgaagcgtcggtgcgttgagtgcgcaagcggcgtcaagcgcactgcccaccgtggcgttggccaccacggaccagtcgaactcgtgcgagccgatatcggtgcgcgggtcggggaaggtcggcgcggagagcagcgacagtcggaacatggtgcccgagtcacgaccttcggcggcgttcccggcgatcggcgtggcatcggacccgtacaccgatccgttgatgacggccgccgcgtaaccggcgtcgccgataagggtgaagcggttcgtgctgctctcatacttggcttcgtcggatgcggtgtttttgacgattgggcggcggaccagaccatactggcagtcgtatgtcgcttggtcggccacgatacccagcggcagatcgactttgaggaagcgttcacgttcgtgccagtcaatgtcggcgtggaaatcgagcgtgtgtgaaccggggcgcagcgtgatggtggtggtgatgacggtgtcatcgtcggcggtacgcacgcggactcgtgccgcaccgttttcggtattcaccgactcgattgatccggtcacggcattcgccatgagcagggattcgcgttcgatctcccacgcatcccaaacggcgggctcgtccttcaacagctcgtatcggcccagtcgggtgccggccgggaccagttcatggttatgctcctcatcaaacagcgaagaaatcgtaccgtcggcctcaatggtgacggacagtacgccgttggccagaagtacacggccgttgtccagcgtctgagtcagcacggaaagcgcgtcggtcggttcgttgatgcggttcgcacgccaagacgcaccgtcattgcggaactgactgatgcgggcttcggcgagcaagtcggcctgcgggttggccttgcgcagcacggcgcacatgtcttgggcgatttcagcgagacgcttcaggtcacggcgatagtcctcgcgggcttcgcggtgcacccatgcgatggatgaccccggcagcacgtcatggaactggttaagcatcagggtcttccagatacggtccagttcttcgcgcggatagtcatagttcgggtcggccaacgtggcggccgcgcccaggtattcgaccgtgcgcaacagcgattcctcttggcggcagccacgtttcatgtcctgttgcgaggtcaaggtgccacggtgcagttcgagatacagctcgcccttccagacgggcatttccgggccggcgttctttgcaagctgctgatgcgccttgtcgaagaagtcgttcggctcttcgatgctcaccttggagacgccttcgaggttctcgtagcggtgtaggtgctccatcatgttgcgcgtggggccgccaccgccatcaccgaaaccgaagagcagaagcgagcggtcggcgagatccttgtcctggaagttcttctcggcgtagtcgagttcctgaaccttgcaccaagcagcataagtatccgccggcgggaagtgggtgaagatgcgcgagccgtcgatgccttcccacatgaacgagtggtgagggaacttggtggtgtcgttccacgagatcttctgcgtgaggaaccattcgtaccctgcacggcgggcgatctgcggccatgcgccggtgtagccgaagctgtccggcagccatacgcccttgggctccacaccgagatgttccttgaagtatttgcggccatatgcaatctggcgaatcagtgattcgccggcgggcagcatgccatcggcttccacccacatgccgccgaccgggatgaaccggccttcttcgatgcgccgcttcatgcgtttgaagatgtccggatgatcctcttccagccaggcgtactgctgggcggagctcatcgcgtatttgaagtcggggtcggcgtccatcagagccaatgcgttggatacggtgcgggccaccttgcggcgtgtctcgcgcaccggccacagccatgcggagtcgatatgtgcgtggccgatggcgctgacgttcatggccgaggcattggccggcttggccagtacgccggcgagtgctgcacgcgcggcttccacggattcggggttgcgctcgtcgtaggcgttgagcgaacgctgcaacgccttcgcgagctgccagtagcgcggcgactgcttgtcggcgagttccatcagggagctcaccacgtcgaggtccacggagtagtgctcgtagcgttcatcgaattcggtcagatcggcggacttgaatacgtacggctcgtccggcttgccggtggcatggtcgcccagttcagtctcaacgaacggaggtacaccgagcaggagcgggttgctggcggcttcaaggtacagggtgaagctgccgtcttcggcgaccgacacttgcgcgttgccttcagcatccatgaacggcacccaatagttgagcgggtgtacggctttgattgcggtgccgtcggcacggtaaacgaggccctcgatatggccaccgcaggagtgcgggtaccagccaaggtcgaggatgagctccagcggtttgcctttcgggtagccggccggcacagtaccggtcaggcggaaccagaccgtgccccatgtggtgccccattcgttgccgagcgtaaacggcttgaaatcgatgtcacctcgattgagcttcgcgaagaactcgtcagtgggcatcggttctccgggaatgtcaaaggactccaccgcaagctgtgcgatcgatgggtggatatgagggtccacgcgctggcgcactatgcgcttgcaacgctccagttgctgttcaggtttcaggaacatctgctgttcactccccttatctctgccgcttgtacggccacatcattgtgctgcccgttcatgggaaacatatcgacatgcgccctcgcccgcagaagactaaagcgctttagtaacatattggagagaacaggatataatgtcaaatcattatcgcaattcagcgtgttccatcaggcatgtcatgctcggtgtcgatgatgatggtcaccggcccgtcattgaccagtccgacccgcatatgcgcgccgaaacgaccttccttcaccggcactcccccggagcgcaacgcctcgttgaacttgatccacatgagatcggcatgctcgggcttgccggccttgatgaagctcgggcgattgcccttgtgcacgtcggcgaacagcgtgaactgcgagatggagagaatctcgccgccgatgtcctgaatcgaacggttcatcttgccctgcgcatcctcgaacaccctgagattcagaatcttatgagccaaccaggcgatctgcttgtcgccgtcctcatcggtgacgcccaccagaatcatgaatccccgggcaatctgctgcggctcgaacgtgggatccagcgtgcccaattcattgaccacgcccacggacgcttcggatactcgttgcaatacgactttcatggttccctacagtacaacgtgtgcagtcaccagccgataacgtacccaaccgactggtgactggcaatacctgcactgcagttcatcgtttaccacttcattcgacgacgaacaccagttccgtacggccgttattgccattgtcgttcttgcccatgagggatcctttcgctcattcgccagccggattgccggcgatatcaatgagcttcgcatcatggaaccagtcctaggtcgcttgacaagcgacaatataccacgtatcggcagcaagtcaggagacaagcgtaccgctccgcatcattgcccaagcaacggctgctcgtatcggaacaacatctcgttaatagtgaatacatcaaacatctcatggacgatgaagaattccacgatcacatcgaatttcacgctgtgcgacagcgcatacccagcgcacgccaatatatcttgcgtctcgtcaatattcagccgtaaggcaatggccagtgccagaaccgttttcttgctgggcatatagccatcgccacagcgaattttagagaacagtttacgattgatattcgctcatttatatacgtccacgtcggaatatcctttggcgtcgataagcctcaagagaatgatgttaaaaagttcatccagattggagagcaccgcatcatccacatgcccggcggatttcggcgatggagctgccgacggtgccgagtagacaggcgtttcatccatatcgcccaggaaatccggcatgtccaagatggattgtctacaatgtattagacagtccgatgagggatgattgacgtgggatcggaggccggcgatggccggcccgaagcatccccgtcactacggcgaggcgttcaaacggcatatcgtgcggctttacgagaacggcaagccggcgcgcgagatcagggccgagtacgacatagcgcggtcgatcccgcggcgttgggtccagggcatccgcgacagcggctccacccgggccgcggacaaccgcacgcccgggcggaacgagccggtcgggccggggaggcgcaacaggcagttggagatggaggtggacgtttcaggacgagcggcgccggtattcgcgcgaaagtagcggtgatacgggccaacgcctcccgctgcccgatatcggcgcagtgcaggatactgggcgttccccgctccacctactactggatgatcgaacatcccgaagccgagcgggtggacccgatcgccggcgacgtgcgcgcggtccggtgcgacagccatgagcgctgcggcgccgggaagatcaaggccgcgctggagcggaggggcgtcaccgcgtccgggaggcgcgtcggcaacatcatgcgcgaacggggcatgcgggcgcgtacgcgcgcagacggtccgaaccgcacaggacgcgggccgacgaggccaggctcgcgaacatcctcggccgcgggttcgacggctacgagccgcgcacccacctggccggtgacctgacgtacgtgcgcgtcggcggcgagtgggcgtacgtgtgcctgctggccggcctggcgaacaggggcatcgccggccattccgccgggcgggcccgggacgcgagcctggtattggccgcgttcgccacgctcggcttcccccctgaccgaggtggaggtgttccacacggaccggggcggcgggttcgacaacgcgaaaatcgacgggccgctcgacgtgttcgacatcggaggatcgccgtcgaggaagggcgacccgtacgacaacgccgtggtcgaatccaccaacaggctcctgaagaaggagctcatataccggaaccaccacaccggcctggaacaaccacgctccgacctcaacgactatgtgcggtggtccgacgaccaaagactccactccacccccggataccggagccccaacgaattcacacaacaaggactcgtcctctaaagaatcgtccaacacgccgttgccaatccagatgccgaacgtcccgacgggacggcggccgtgtcatcaaagcgaccgcacgaactctccgcccggaagcggacggcgctgattttggaggacccatcggccgtggcattcccgggcccggaacatgccatggggtttgcggaccccgggcgacgccgcatggccttcccgttcccgcgccacgggcggcggcatggttcatggcgccgacggtgggtccgtccgcacgcggagcgcttccatgcctcgttgacggatggtggcgatcccccacagagaggagtattgtttcatttgtagataacattgttacacagtaggagagcattgatatgcaatctgaacgttcgttgattcccacccccatgccggtccggagacacgcacggtccgggaacagggggctggccctcaccgccctgtgtctggcggtgctgctggtcgtgatggacaacaccatcgtcaacgtcgcgattcccacgatgagcgacgcgttgaacgcctcgtccacggacctgcaatgggtggtggacgcctacacgctgtccttcgcggcgctgctcctgcccgccggcaaactcagcgaccgatggggaagaagacggatgctgctcgtcggattggcgggattcgccgtggtctccgcagccacggccttctcctgggccctgcggcagctggtgacgctgcgcgtggtgttgggggtctgcgccgcgctgatctatccggcgacgctgtcgtcaatcatcgtcatcttcgaaggctccaggtaccgtagcctggccgttggcctgtgggcggcgacatcaggggtcggcatcgccctgggcccgatcatcggcggcgtcctgctggagcactatgcgtggaattccattttctgggtgtgctccgtcattggcgtggtggcgctggcctgcatcgcggtggcggtgcccgaggtacgggcgtaccgttccgagaggttcgatttccccggcaccgtgttatcggtggccggcgtgggcctgctggtgtgggcgatcatcgaacgcccgacttacggctggctctcctggcaggtcataggcggcatctgcgcggccctgatcatacttgcggtgttcgcggcggtcgaggggcatacgcacgccccgctcatcgatgtcggcctgttccgaagggccacgttcacgagcagcacctgcgcgatctgcgtcgcgttcttctgcctgttcggcttcatcttcatcaccacccaatggttccaggcattgcgtggatacaccgcattgcagacggcggtcgcgacgctgcccttcgcggtggtcatggcggcggtcgccccgctcgccacgcaattggcgaaacgtttcggataccggtcggtcgtctcgacgggactgctgttcctgtcggcgagcatgttcgtggtcacgcgtgtcgacgcccattgcagctactggttcgtggtcgtacccaccatggccctgatggcggccggcatcgccctgatccaagggcccgccacggacgccctgatgagcaccgttccggaaagctcgaccggcgccgcatcggccgtcaacgacacgatccgtgagatcggcggcacgctgggcgtcgccgtcatggggtccgcgatctcctccgtctaccccgacgagctctcggactcgttgtccggactgcagatcccgtcttccatcgcgaaagccgcggaggattcggtgatggccgcgaaatcgatccttccgcacctgccggcaggcatccgacagaccgtggagcagtccgtctcgaccagtttcatgagcgccacgcatgcggcatgctggatcgcctgcgccctcgcattggcgttcgcgctgctctgctggatcacacttcccaaacacgattcaggcaatctcccccaatagaccggaacggatgcgggccacgggccgtccgatggcgtcacggtacatgacacttggatcggcgtacggggcgccaccattcccgactgcttggacacgctgctcgacgggacagagcccgtccaaccggacgggcaggccacgcccatccgcatcatcatccccttcgactcccctgcggagaaggggaatacgatgcgggagctccgcattctgaagcatgccctgcggcaccaccggtagccgacgggcatgcctgacgtgcgtgcgggacgatgccacggtgccgccgtcccacacgccgacggcatcatatgcgcgatgccccggcatggcacgcggcgggaggacggcacgcccgcgccggccagcgttccccgacatgtcttggctcggtggcaatctcaatgcggtgggaccagccatcacacccatcgaggcgcggtccaagagcgtggctggatcttcgaccccacccatcatgggacggtgcagggacctacgggccggatggcgtttttcatccgtaacggcgggatgatgcggagaagcatatgaggactattcggaaaacgacaaaaagccagcggacgcccaccaccgagatcaggggcctcatactcgacgcctcgaaacgcatcatcgaagaggacggctatgacgccttcaccatccggcttctctcggaaaaggcggatgtgtcccccgcgagcatctaccggcatatcggcgacaagcaggccgtcatcaacgctctcatcgacgacagtttccagacgttacgggagaagctcctgcgcgtcaccaccgaggatcccctgcaaagactctacgatgcgggagtcgtataccgcgggcacgccaaggcgtcgcccggcatctacgccctgttgtggcgatggcatgcgggcgaggcttcggaggcatgcctcgccgccatgaccgagctggtgcgctacgggcaggccgcgggaaagatccggagggatgacccgcacctcatcgcatggtccatatggtccgccgtgcacggattcgtccaattcgagacacgacccgaacatgatacgcccgtcgacgatgacgatgcggcctattcctttctgctccggctgctcattcgaggggtccgcgcccctcagacggtctccgagggaacggcgaccatcgcggataccagccgatcgtagaatcgccattggccgcgcaacgccacatcccgtctcacagcggcgaacgttccatccgccttcaggctcacggataccttacggaagtcccccgtcccgtccaatgcgtacaacgccttcgaggcggcctccttcgcgcagaaggccgccctacgttccaccgaggaggccatacgcaatgatgcgagctcttcggaagagaacacgaaccgcatgatcccgtcggacaatccgtccgaatcgtccacgtccactcccacggcacggattctttccgccgacgccacggcggcgacgcacagcgacggacaatgcgacagcgatcccacgatgccggatggccagagcggttcaccatccgaacctttgagtatgggcccgtcatggccgatacgtcgtaaggcctcgtgggccaaaagacgcgtctccgtgaattcctttcttcgtttggccgtggcgttcccgaccaaggcccgctcaccgtcgaacaatcgcacgcggcgcgtcccctcccccgagatcagcaccttggattggcaacggtgtgttggacagttctttagaggacgagtccttgttgtgtgaattcgttggggctccggtatccgggggtggagtggagtctttggtcgtcggaccaccacacatagtcgttgaggtcggagcgtggttgttccaggccggtgtggtggttccggtatatgagctccttcttcaggagcctgttggtggattcgaccacggcgttgtcgcacgggtcgcccttcctcgacggcgatcctccgatgtcgaacacgtcgagcggcccgtcgattttcgcgttgtcgaacccgccgccccggtccgtgtggagcacctccacctcggtcagggggaagccgagcgtggcgaacgcgcccaataccaggctcgcgtcccgggcccgcccggcggaatggccggtaatgcccctgttcgccaggccggccagcaggcacacgtacgcccactcgccgccgacgcgcacgtacgtcaggtcaccggccaggtgggtgcgcggctcgcagccgtcgaacccgcggccgaggatgttcgcgagcccggcctcgtcggcccgcgtcctgtgcggttcggaccgtctgcgcgcgtacgcgcccgcatgccccgccgcttcatgatgtcgacgatccttcgcctggacgcggtgacgcctttcctggccaaagcggccttgatcttcctcgctctgtagcgctcatggctgtcgcgccagaccgcgtgcacgtcgcccgcgatgggatcgatccgctcggtttcggtatgcccggccatccagtaacaggcggagcggggaacgcccggcatcccgcatcgcgccgatatcgggcagcgggaggcgttggcccgtatcaccgctactttcgtgcgaatgccggcgccgctcgtcctgaaacgtccacctccatctccaactgcctgttgcgcctccccggcccgaccggctcgttccgcccgggcgtgcggttgtccgcggctttcgtggagccgctgtcgcggatgccctggacccaacggcgcagcgtggaatgcgagatgtcgtactcggccctgatctcccgggagggcttgccgttctcatacaactgcacgatctgccgtttgaacgactcctcgtagtgacggggatgcttcgggccggccatcgtcggcctccaatcccacgtcaatcgtcccccatcggactgtctaatacattgtagacaatccacgcacacgaaagaagcatgcgagtgttcctgcgacctatctcagatggcgaagccgctcgatcagatcgacgagcgtctgttcctcctgttccacgcagtctaggaaaatggagcagaacgaatccggcttgccgtccacctgccatgcctccaggcctcgcgcgtatgaccgacccgcatcgtatttgatggccacgggacggtatccgttccgcagcagcacgaagttgagcagctggcggccggtccgcccgttgccgtccatgaatggatggatgttctcgaacatcgcgtggaaaccggcggccctgagcagcggatgcgctgcgcagccatccaacccgtcgatcaaggatcgcaggtcgtcgcggatctccagcgggtccgcggtcttgactcgggtggcggtgatccgcgccaaatagccatagggacggaacgtgccgcgggcgaacggctggagatccaatgcggtcacctcgtgtagacgacggatcagctcctcgttcagcttccgcccctccttggcatattcgcgcacgtaggccatgccgtcagcgacccctcgcgctgcgaacacgtatctggccggcgagtccgatgggacgaactcgccctccagcaccagcgacgtgtcctccagggtcagcgtggacccctcgatggcgttcgaattgtaggtgtagcgcaccaaccagtcgcggtcgtaatccgccaacgccatgtcctcgacaccgtccaacggctccagcgagcgggcccggtccttcagcgcgtcgatcctccgcaggcgttcggaaatctcccgtcccccttcaagggcgttcagctcgtcgggaagggcctggatgtgccgcgacagctcgggattggccatcatgctcctcttttcgtgttccggttgcaaagtccattattccagtagtgattcgttgcggagatgcgggcaattccccgaaccgcccatgaagcatagcccaggcccctgcgatactcattcgggctcatccaacctcgggattccttaaccagccctcataatagtactccaagtagttataggatccagcatccgttgcccccattaaacccggtctcaagcccatgagacacttgaaaccatgactaccatcatcatgcgcacctccgatgataatcgtggtcagctgtttttggctttattccaagattttcaatttttgggaaacctgccgatcagcctcgtcttccacgaggcacctacaggcacccaaaaataatccgggaacgttccaccaccctgccggcgctcagcgtcttcgccgaccggcacggaaaagtgcaatgccccttgtgatttcatgatgttccgcatgggtggtgcccagaagcattcgcccggcagcacgtctctatggcggacaatagacagaacgatacgcggcccgcgcaaccgtcccagccgccaatggcatcccaaatccatcccgaatcccacaggcccattgcagacagcccagatcagctggctcatagtccaaagccgcctgcgacgccaccgtcccaatggcaggaacggtcagctgcgcagtatgatttccgccctgtccgccagttcccgttcgcgcacacccatggcagacaggatcgcttgtctccgcgatggcatggcggaggtcgcccgtgcgaccaatgcggagaagcgaccgaacaattccaagtaatcgtccttgtcaagcaaatagccaagatcaccgatggcctggtacacgttctcgttagcgcgcccatcgtaccgggcacaatagcagcgctcgtcatgcgcgcacaggttgcggtagaacaccagtctgttgaagatgctgtccagccgcttgatggtgatgcgccgtggcccgtcgtgcgtgtccgcatacaaaccggtgaaactttcggcgaccgccaatcggacggccggggactggacttggaagaaccataccgtctgaccaaaagaaagatcgttggccagcacccacaacgggacctggccgttgtggtcttccatgcaatggcggatatacgccttgccgccatagtcgcccttgttgcgcgggctgccgtccaactcaagtatccgcttgaagaccttgtcgatcaacgccacggcgctcggacggcgcctggaatcataatagtcgggattgagatacgggttgacctcgtcggaatgcagcctggtgaactcatgcgcgcacactgccttgagtgcggcctccgcccgtgtgatggcggaaaacagcagttcacgcaactcacggtcgaacaggaacagggcgtacagatcatcgaaacgcgcgcccgtcccataccggtcatcaccagcggtcaggcatgcctttcggtcgaggaacaaatccttatagccattgacgatcggataatagccctcgcgcctgagcacatgaaccgcaccggcatcgacggccatgccacgggagcgcagaatgcgcagctgttcgtccacactcctgtagggcttgcgcaacgacatggatccgacctcccccaatccggcgatgaaagcaccgaggccaccccgcatccacggaatggcctcagcgaaccgaacgaagtccagcttatttcgctgttacagaatagcgctaatcccccgcgaatgcaacccaaccggacgtcgaatgagatgaaacctccatatcattattccaaaggcacacgccgatccatcaaggccaccaccagaaaaacccaaacgcctccaaaaagagacgacgcacgcctccacgagatctgtggcatgtccctcgctctttcaagcgtctgcacgaaccggtcgaagtcgtaagtgtcgtatgtgtcgtacatcgatgatgtcaggttcccaagcagagcgctcgtggcgcttcatcaggaggctggaatattactcgtcaccgccgcaggaacggcgcaagccttccgcttccttgaactgggcctgccctctccggcaagccctgcttacaatagagcttgttcctccgccgttcgagaatcggaccaatatacgccgaatttgccacacgcttgcagtcctcctagtatgcgttggactcttatgcgcagcaagcggctttatttttgactacctgcatccagaatacgtacccagctttccttcatacctttatcttctacgggcggtcccctcctcatcgccgctggtgtcgtcgaaactgtttttcgcttactaaaaagaagaaataaaggtagaaggaatgcaagcaatttcccgaaccgctcatgaagcatggcccaggctccagcgatacccattcgagttcacccaacccctggggactccttaatccgcccttacaacagcactccatgcagccatcgagccccagccccgaacacgtcgatgtgccaccggccggtctcaagcccatgagacacttaagaccatgactaccatcatcatgcgcacctctgaaggtgacatgcacatgatgcttcttctctgggatgcgacaccaggaaacaggtcactgaaaatcgttgaaattccaatcaaaaccactttgaacaatcccgattttcccgagaaatagaatccccgaggccgcagggtggcaccttatccaaaatctccggcgtaggcaattactctttcttctaatggtttttcaagaagtagagaaagacaaaacaaccgatgtccaacggagacaggaaaagacgaaaatggggatgcgtcgtcgcctgcaaggacgcggacggaaggatcgtctcctggcaggcccgataccagagtcccgtcaatcccaggcaaagaatctaccgccgattcggattggaattccagaccgaggcgtaccgctggctcgacgaggagcacgcgctcgtcatcgaccataaaaagggaatccgcaggtggacgcatccgtcggcgaggacgatgcacggcagggtcctgttctcctcatacgcgacgcgtttcgtcgccgacctgcggaagaaggacgggtcggaactgagcggcagaagcaagcggatccagaaggcggcgttggacaaactgctcccctggttcggcgagacgcccatgtgcgacatcaccgaggaattcgtcaacgaatggtacgcgaaggcatgcgacgaggtacgtccctccgcgctcgagcacgcggtctggctgctcaagcgcgtgatgagggccgcgaccgagcggcagccggacggaggaccgccgctattgtcctcgaatccatgcaatctcgtcacgaggaagagaccgtccaaaagacgcgagcaggcgccgatgaccaggcaggagatcgacacgctggtcgagggcttcccggaatactaccgtctgtcgatccatctcgcgctgctggtgggcgggctgcgcatcggagaggtctgcggactgcaactcagggacatcgacctcgaccacaggctgctgtacgtgcggcattccgtgacgcagggtccggacgatctgggcgaataccggctcgacgagacgaagaccccggaaagccaccgagtcgtgcccatccccgcaccagtctgccgtctcatcagggaacatatcgacaggttctgtcccgacagggatcccgacacgatgctcttccacgcgatcaggcacccggaacgggtcctgaacccgacgacgatccaacggcagttccgcaccgcgaggaaaagaatcaaccgcgaggacgtgacgttccactccctgcgcgcgacgcacgcgacgatgttcatgatccagggcggcacgctgcgcgagaccatggacgagctcggccatgtggacgtcgacgtggccgtccgatgctaccaacgcgtggtgccgagacacaggcgcgacgtcgccgaacgactggcgctcgaatatctccccgccggggatccggccggcatcaaggcgcagatagcccagaaggaagaggaaatcgaccagctgcgacaaaccgtcgccggactccggagaagactggaagagctcgaagacgacggagacgggcggagccagtccggataagcatacccaaaaccgaaaaaccgaaaaaccgaaataatgaaaaaccaaaaccggtggagaccggcatcaaacggaacaggcccacgcatctaagcgttgcggcatctgccgtcgcaacacttagatacgtgaggcgttatccgaaaatcatctcgacctgtgcctgagtttcggcttttcctgccctggaggaacgatggcacgctgataggagtaatgctcgcacacatgttgtctctgtgcgggagacatgtcgtatgccttattcgccggttgcgcatactcaccaagatgggccagatcattcgacatggtcaacggttcggacaacggcttgacgattctcctgaacatatcctcaaggggacgcaggtcgtttcgttgcatccccgcgatcgaggcttgatcgttcgtccttttgtcgatgagtccccaatcaaaatgccagccggcctcgcgcgcgatgatctcccagaaaatgcgttgcgtccgcccgttgccctcacggaacgggtgaaggatgttgaagttgttgtagctgacgctcagacgcttcacgaattcttcatgaccgaggcctttgagaaaatcgtcaccgcgaagcaccccctcggagtagtgcacccctatgctaaacagctccaacggctggaagggaagcccctcgcccttgcccatgtcgatggttcgtatctcccccgcccagtcgtacacgtcctggaagaggaaccggtgtatgcggcgaagctgttccagcgtcccctccgcaggtgggagattctctctcagaatggcggcgcgggcggagcagagatcgttctccgcagccgccagcgcatcctcgtccgcggcacccacaaggttccgcagcacgttcgtccccggaatcagatagggatcgaagacacgcgccatcgtcactccaatccgtaacggcgacgggtgcgggaaagaagctcggcgctgccgatgctcccccgcgcatattctccggcatcgcgtatgaaggccctcgtcacgtcaccgccttccagccgcacggactgcaccgacagtccgacgttctccgtgcggcggcgcatctcggattcagatatcgttccgaacattgcacctccttttctctttagattctagcaaaaccgacggcccttagacggagccgcgcctgattccgctcctaaagtccttcattccagtcgcaatcctttcgccagatgccacgcatgacacgtcaggcacgccaccgcaccgtcatcgcccagaaggagcgtcagatcggcaagctccgggacgaggtggaaaggctcaggaagatcctgctggaacgagataccggaaccggtgaaaaccgggaaaccgttttacctaaaaccgaaataccgaaagaactacataccgaaaaaccgggatatggaaacactggaaaaccgagacaaggagaaaccgatgaacgagaagacccgcgaaccgatggtgatcgcgctttgagactgcttatatcgttttggacggaatgagcgtcaatcagaaagttatgtatgatggtttcgcctatttatctcggtaaggagaatcccatctcatacaagacagtattcggcatggacgctttcgatagacatgacaccgatggaggaaaccaaaccgcggattcagccagcgatataaaggtgtatcctgagtccgcttcgggatgtttgattaacgacttgggcaagttgctgaatatgaatccggatttctatagacgacggatccgccgcattagaccggctgcgattgccgtcgggctgagcgccatttgcctgattgccattttcttgattccaagtgaatcgaatccggttttccagaattccttcagcgcactgtttggtttcttcctcgggttggcctcctcggcatatgagaagttccgcaaatgggccgaacgagtcaatcagaccatgaaagacgctgaaggaagtatgccgatatgggaagccatatataagaattccatattctacgatgaatgcttcataacgcttccggcggcacgcgtatccccaacctgggcacaaagagcatggattaaaatcaggttcccctcattgtcacgcaaatggcataaatactttcgcaacggaatgaccgaacctggtttgcagccattatccaatgagaggaaacgcagaaagcggcttcattacctggagtcgctaagccgatgcgtcttcatgctcgaaccgtatcaggcgactcttgattatctactggactattcggataagatcctcggggagaaaattcgtcaggataaaatcctaaagggatatcttcagcctgtcggaggaatctacatttaccaaaaaaatgtaggtaaatgacgcatgccaagataccggaatacggaaataccgaaaaaacgagataacggaatcggtttcagcccccggaatccatcaccgtacgccccttaccgaagagatggtcgaacagcttctggcgaggggcagaactgtcaacagcagcaagcaccagaccatgcttgccatcgctgccattaaaaatgacgacacggacgacatcgtacagaagaaaatacagatgaccgcaaagttcgtggacgacttcgcgacggttgccaggacataggcgaacgggcagtcccagcccctcgctcaacgcctccaccgtgatgatgaaccgtatcggacattcctcggacatgagatccacgtctttgagctcgtccacgttgccggtgttgtatggaggatcgatgtagatgcaatccactttgccttcgtattcgggcagcagggccttgagtgcttcgagattgtccccatggatgaccatgttgccgcaatcggatccatgcgaatccaaaacgctcttttcagggatgcgttcgagtacacggtacggcacttgagggtggtatgcgaccaccttgttcttccccatccactccaaagtcggtgctttcggcctaatggctcatatggtacccaggaccctcgtgatcaattccggcactcttgccatccccgtcttgccgggcaaggttctgccgcagcgtgtcgccgaacctgtccaacagatccgttttgctgcgaatggcgtccggcttccgacgcaatccctcgaccagttcgatgaacgcgtgttcctcctgttccacgcagtcgaggaacacggaacagaacgccacgggatcgccgtccacctgccaggtctccagactgcgggcatagtcgcgcttggcatcatacttgatcgccacgggacgatagccgtgcttcagcagcatgaaattgagcagctggcggccggtccgcccgttgccgtccatgaacgggtggatgttctcgaacatcgcatggaagccggcggccctgagcagcggatgagcgccgctcgcgtccagcccgtcgatcagggcccgcaggtcgtcgcggatctccagcgggtcggcggtcttgacgcgggtcgcggtgatcctcgccagataaccgtaggggcggaacgtgccgcgggcgaacggctggaggtccagcgccgtcacctcatggacgcgccggaccagttcctcatccagtctcctcccctcccgggcgtattcgcgcacgtaggccatgccgtccgcgacgccgcgcgcggcgaacacgtaccgtgccggcgaatccgacgggacgaactcgccctccaaaaccagggacgtgtcctccagggtcagcgtggatccctctatggcgtttgaattgtaggtgtagcgcaccagccagtcgcggtcgtaatccgccagcgccatgtcctcgacgccgtccagggggtccagtgcgcgggcacggtccttcagcacgtcgattcgtcgcaggcgttcggcgattcccggctcgcgttcaaggccgagcagttcctcgggcagttcctgtatgcgctgcgataactcgggattggccatcatgtccctcttttcgtgttccggttgcaaagtccattattccagccgcggttcgttccgtcctgcggcctgcatgtcatagggaggcgcgccggccgtcccgggtcgattcgaacgccgcggccacctcttccgataccggcatgcacatcgtcaccctgccggtttcctgcgcggcggcacgtttcatggctcggcgttcggccctggtgggccgttcgagaatccactcggcgaacgtgcggataaggatggacgcgacgatcacgccgatggatccccagaagcacgggacaaagtccggcttggagtggtcgtaccagaaccagacgatcaacgcgaggatcagcgccagtccggcggccagggcggcgagcttgtggaataccagggcgagcgtgcggatgggatgcgtgaccagccccaccgccagcgcgacgacgacgagcagtgcgacgaagcccgcggcgatgatggcgatgcccaggtatatcgcgagcatatagagtccgaacatgatcggccttccttctctcttctattccgtttcttcgggcagataggtgtagtcgacggcgacgccctccgcctcaagcagcacggcggcctcgcgcacggcggcggcgcggcgcttcacggattcctcggcccggacccagtcgggcagcccatcgggcaggtcggagacgcgggagaacgagagcgtgaccctcgtctctcccctgtgccgttccacgatggccgcgacggcgcgcctgtgctcggcgagatagtgttcgagcatctcccgcatcctctccgagggttggatccggtatttctccgactcgtatttcttgaccatgtccacggtgaggttcgcaagtacggccgcgtcgtgctgggtcatgccgatgcgttcgcgcgtcgcgcgcatccacgccttggcctcgctccaatcctcttttgccatggtccctcccggatataagaaagccggatccgcctgcgcgaaccgtgattatacttttagtataatcgaggttttctacagggcggacccggcgtttcccgggacgcggccgtggccgcgccccggtttcgtcactcggtcggcatcgatggattatcgtcggccgtggccttgcgctgccggtcgagcatctgctgctggatcaggacgctgttggtctgggccgtgtactgcttctgggccatgtccatgctttcctggtggcgttgtccctcgacgtcagcgaagacgagccgctggatgttctgcgcgagctgcatgagcttgtccttttcgaggatggacaccttgacgctgttcctgccgccggcctggttgacgaagtcgagctgcgcgctcatcgtgttcgccaggttcgcggccgcgagcaggaggaacaggatccccacaagcgcgctgctcgaaaggaacgagagtccggcgacgagaaagacggcgccccagacgaagctaccgaggttgaacttcgtgttcgtgtccacggacgcgatgctgcgcagcgggatcgtctgcgtggacgagccgagcgggatcacgcccagcagggtgttcgggctcttgtacatcacgcgcatgttgctcgcggcgacgctggtcttgagccagaagagcaccacggacgggctgaaccggtcgccgatgacgtcggtctcccccgtcgcgtaagtgaattcggtcatggtctgctgtgtctccgtcatttctttttcctttccttgttgttattgccgaagtcgaaggcgacgcccttgtccttgtcgatgacgagcgcggcgtcaaacgtgccgcccttcctcgaggtgaagcccttgaggctgaccttccggccgtcgagcagcctgcgcatggtcgtgtcggtgatggtcttgccggccacggtcgtccaggcgcgccagccgcatccctccgtggtcctccatgtaccgtcggattgtttctcgcgccggttggtggagcattggaacaccttgcccgttttgacgacgggcttgccgcagcgcgggcagccgccgaacgattccgtgttccgcgtcttcgcctgcacatggtcctgccggacggtggtctgcgcgtcggccggtatgcgcgcggcgaggtcgcggaactccgtttcgacctgcgaggcgtccgcctgtccgtgttcgacctccgagaggcgtcgttccatgtcggcggtcaatgccacgtccttgagcttcggggcgaccacgtcgatcagggaacggccctggtccgtggagcgcagctgcttgcccttgcggtccacgtatccggtgcggatcagcttctcgatcacgtcggcgcgcgtggccggggtgccgatgcctcccgagtgggattcgtcgtcgtccaatgcggccttgaggtccttgtcctccacccagcggctggcgtgttccatcgcggcgagcagcgtcgcctcggtgaacggcttcggcggtttcgtctttccctcggacaatgtcgcgccgcattgcgggacgagtgcgatggagaccccgtcggtgaggttcgcggggatgatgttgcccgcggcctcgtcctcctcgccatggtcctcctgcggggcggcatgctcgatggcgtgccagccgagggagacgggctggtcggaacggctggtgaaacggcattcgccctcgggtagaagtcggccttcgtccggatgtttctcgcaccaatgcgggtcgatgttcgcgacgacgttcgtcacgtcgtgcacgtagtcgtcgcccacggcctcccacatgcgtcgcaccacgcgaatcaatacgaggcgttcgtcgtcgccgagctcgtcgagcgccgccttgtcggcctgcatggtgggaaggatggcggtgtggccggccaccttcgtgtcgttcacggtcagttcgagatatggccgttcaggtttcgcgtccggttcgatgaagccggcggcgaggcggtcgccttcggtgaggccgcgcagcgtgcccaggtcgtcgtgcgtgatgtactgcgaatcggtgcgcggatacgtcgccagtttttctcatacagggattgcaaggcggccagggtgcgggcggcggtcaggccgtgcagccggctcatgtccttctgcaatccggtcaggtcgtacaggcgtggcggcgcgtcgtggcgttgcttgcgttcgacagcaaagatgccgaatctgaaatcgggcgcgttgacgatccgcagcagagtctccgcgtcctctcgcttgtccaaacgttcgccggccagtttccatccgcccatcggggcgacgaccttccagtacggtcgggccacatggccggtaatgtccctgtcgcggtccacgatcatcgcgagtgtgggcgtctgcacacgtccaacggtgaaccgagcgttgtagacgaggctgtaggcgcgcgacgcgttcatgccgatcagccagtcggccttcgcacggatcatcgccgaatcggcgagcccctggtattccgtctcgtccttcatggacgcgagggcgtcgcggatggcgtcctcctccaggctcgcgacccacaggcgtcgcatcggcttggagactcctacatgcgtcacgatccgacggaagatggcctcgccctcacggtcgggatcgcatgcgtcgacaagcatgtcgacgtcgccgcggcgcatcagtcccgcgacgaccttgtactggcggtccgcgcccttgtcccggctgaccttccattgccagtcgggtgtcgggtcgatgggcagcgtgtcgaggctccacctgtcccagtcgtggtccttatattcgtcgggcgcggccaggtcgacgaggtggccctgcgcccaggtgaccaggtcgtcgccgacctgcacatagccgtcatgcttttccatgtgcccgccgaccgcctgggcgatggcctggccgaccgaatgcttctcggcgatgatcagtcgcatcccgcatcacgtccgatcatcagtagttgccggacgcccatgcgggccgtccgtcgtccgaggtgtcgggttcggctgcgggctcctgcggggcgggctcgtcgtccgcctcctggacgtcggatccggtcgtctccggatccgtcacggcgtcggccgccggcgcggcggtgggttcggcggagacggtttttcttccggccggcgcggcgacgagctcgcccttcgcatcgaacgcgacgttcttctccgttccggtcatcgccagcttgtccgcgatcatcgtccgactcatgccggggaacgcctcctcgaattgcctcgccgcgtcgcgcagcgcctgcgcgcttttgcggaaattgtcgaggcggttgtcgaacttcttcgccgccgtctccttgcgtttgaacgactcgcgttcgtcgcgcaggaagtcgtccacgtaatcggatgccatggtccgtttcctttccagtcttgttttcatcggttcccggtttcgatccggctggaaccatggtcgcgcaattggacacatgccggtttggacagtcgggctccgccaggatcacacgcttgtgatcctggcttcgccggaaacggagcgcggccctgggccgcgcgctatcttcgccgacccttccgggatttccaggcgtcgacgcctggaagggaacggtcggccggccatggttcatcatcacagccccgcgcccgcgtcttcggaactgcgtgttccatgctccgctccgggagggcttcgcccgattatcccaaagcgggcacggcccacgcgtcctccaccgcgcggcgggaccgcgaggctgccccatgtccggcgaaaggaaaacaggaacgccggcaggacattaaggagtcgaaccatgcggatggaaccgatggaattgcagcacgccgtcttcgagaccgacgggggacgaatcgacgcgatgtggagcgacgtgcgtctccacgcgggcgacattctcgacggatggcactgctacgccgtcaggggcggcgacggtggatggccgccatgcagcatcgagaaaacagtatgggtcaaccacgcgggcgacatcatcacgcccgacgacctcaacccgctgctcgaaaggaacgggtggatgctcgtcatcagggactggtggttcaccgacgaaccgttcgggcgcgcggaatgaaaggagacatggacatgaaggagaagaacagggccgaggaatggttccgggccaaacacgacgaggccgacgcggacgcgcattgggccgacgcggcatggtgggacgaacgggcccggaccatgtgggacgaggtcgacgacatccccgacaatggcctctactggacaagcgtcgaagactaaaacatcatcgccgttcccgaccgggtgacgccccgggaccgatgccgcccgcatgacgcgggcggcgcctccggcggccagaggacgactaccgtcctctggaccccacgcgccgggaaacggagcacggcaccaatgccgcgcgcatcccgaggattttcttttgaccggccggctgacgccttgatcatagcggcacgcggaacccgtcaacgcccgcgcagcgaaacccgtggtttcgacgcgttctcatgacggaacccgctaccaccgctagcgctttcgcttgaccatccggtcaaaagaaaaatatcctagaatggaagacgacgaaaacaaggaggcggacatgccggtcatcagcatgttcttcggaatcatcatcaccatgaacgcggacgaccatgttccgccacacatccacgccagataccaaggacatgaagcgtccttcaccttcgatggcaatctgctcaagggagacctaccgcgcaagcagcgcaaactggtcgaggcatgggtgctgctgcatgccgaagagctggaagccgactgggagctggccttcaacctcgagcacccattcagaatcgacccgctacgctgacaaggaggcaacggacatgaccatcgactattcaatcaaagtgacccaatgcgagcccatgcccggctacaagctcaaggtcacctgctccgacggcgcgaccggaatcttcgacatgtcccgatacgtcgaccgcggcatgttcaaaccgctcaaggacccgcagacgttcgaccgcgtgcgactcgcgttcggcgtgccctcatggcccggagacatcgacatcgccgcggaacgcgtccgctccgacatgcaaatcatctaggaacccgcacacccctgccccgaccgtcatcaagacggccggggctttttcatgcccgtatgcatgacggacatgacgcgccaccaacgacccaccggccccgcgatttttcgcggggccttttcatttcccgcgctccaagtgtccaaacccgccactgtttccacgacggacgattggcgtaagacaccggccttcccttcaaggccatgggcgaaaggagcgaggggtgaacgcgatcatccttcacggcattgcgcaatcatgccgtgcgaaatcgctcccaatcaatgaaattgatatgggagcagcaagtgacgtgaacgtatatacgttcactcgattcgcaccgcgaatcggcttgctcgggagacccagaccccatggtcgagcaagctctccagaccgcttcgcggcatcacggacgtgccgtccgcacacctcccctggaggtgcggaatgagctgggcgaacaagcgccgacgcaccgtgcagaagctcgtcacgttcacttccgacgagtgggaacgcgtcaattcgctgcacaaaaaggtgaacaagtacacgacaagataccgttcgttcaccgcgttcgcgcgcaagatgctggccgatggcgagatccgcgtcgtcgagatcaggccgctgacggaccccgagccgcttgcccgggagatcggccgcatcggtgtgaacgtcaaccagatcgcccactgggcgaacgcgaacgagcacatcaccgccgagcaggtggccgagctccgcgcgtcgttcgaccgcatcgagcgtctgctcggcgacctgttcgccgacaggcgcgaagcccggaaggacgtgtgagcatggccgtggtcaagctcggcaagcccgtgaaatcgaatctcggcggccccaacggggcgatggcgtacatcatcgaccccgccaagaccgacggcggaagactggtcagctccaactacgagcggaccggaacggactacgacgcgctggctgatccaatgctcgaagacaacgagaactcacccaaaggcatccaaaagaacagccgtctggcgtaccacatcaagctgagcttcagtcccgatgaccccgtgacgcccgagcgggtgcacgaactcggtgtggagtttgcgcaccgcatcaccagtgatgaatacaagttcgtggtcgccacacacaccgaccgccaccacctgcacgaccacatcatggtgtgcgccgcctcccgatacgggaagcatctgaaggcggaactacccaaggacatcatcgaacagtggcgcgtcatcgccaacgagatcagcgagagggaggggctaagcgtcatcttcaaccccgccaccgagcgggtcgcacgcaaaatgcgcggcgacgaaaccacgccgaacgaagacccgacgacacaggcacgcgaccccaaacatgtcgaagagacttccgaaccgggcacggcggcgacggcgcgaacgacgcgacgggccgaaaacgaggagccgatggagcgtcgctacggcatgtcgatggaggagatctacgcgtccgcgaagggcctgggcgtcaaggaccagctccgcatgctgatcgacctgaccctggccggcgcggagaacttcgaggactggaggaacatgctcgacgtgcagggcgtggacgtgacggtccgaggacagcacttcacgttcaccatgaaggacaccggcttcaaggtccgagacacgaaactcggctcggcgtacgacatgacgaacatcatggccggactgcaaagcacgcccgtcatccccatcacgttcaaccgtcggctcgtcgccaaacagaccaggaagacggtcaccgtgtggctgcccggcacccaccggaagaaaaagatcacgttcgacgcgaagcgtctcgtggacgacggcggatccacgctgcgcgcgttcctgcccctccaccgcgaccagatcatcctcgacccgtccaaccggtacgccggcaagaccaccacccacggcctctaccagtggttcggcgagcccgcgaaccgactcgaaccactggcctcgcccgaacggctgcccctgcgctacggggtaagtcccgcccagcagcgctactaccaggcacaggcgcgacgcctcgaccggctcgccggcgaggcgaaggcgctgaacgcggcgatccgctggaccaggctcgcgggcggcgacagcgccaagggactcaagctgctgcgcggaaaggtccgcgaatcgcacgacgaactccaggccgccgtcatcgcgttgcatgacgcgatccaacagggagaccccgacctcgtggccgagacgcgcggcgagatggaacgtcgcgaggccctgtgcgaccggtacgagggcgagctggccgccatcgaacgggagatccacacgacccgcgaccgcgagcaaacggagaccgagcagcgcgaacagcatcagcacaagcgtggacggtccatctgaaccgtcccaggaaacaccaaccgacaacagaaaggaaaccgcaatgccaatcgaggaacaggctgaggagaagatccagaacgccgtccagaccatcatcaccggaggcgcgaagctcatgctcagaatccccaagggcgtggccatggcgctgctccgttccggcatgaagctcaccaagaccggcgtgcacgccgcgggcgaggccgtcaagaacaagatcgacagcggtgagatgtccgagaaacgattgcaaaggaagaaggacggcgacctgcacgagctgcaactcgacgactcgaccatgcgcgaggtacagcacagcctcaagaccgccggcatcgactaccacctcgaacgcaccgaccaaggccagttcatcctgcacttcgccggcaaggacgaagaccatgtccgccacgcagtgcaacgcgcgttcaaaggcatgggcctggacgtcaccgacgacgacttcaccgtcgagcagacggaacagacccgaaacgagccagaacccccggcgcgggagaccccggccgaatcagccatgaagcccatgccgacgcagcgcatcgcctgggacttcgtggacccggaggtcatggagatggccgcgaacagcctcgccgcccggcatcccgaactctcatgggacaagctcatgggcgacacaacatgcgacgagcaggccggccgcgacttcgcggaccggatcatcggcaaggccgccgccgacccgagcctgcgcgacgagctcgacgccatcctgcgcgacgactacgggcagggcgcgcaaacccaggagcagacacgcaggcagacgaccgagccgaaccgggagaaaccggcaccggagccggaaagcgaaccggaacccgcgccggacgaagcccggacaccggccacgcgacagcagacgcaggccagggcagacaatcccaggccggccggcaaggagcggaaaccgaagccgatccggtcgaagaaggcactgctcgaacggttcaagacccggctcaacgagaacctcgccgaacaaaagaaccacatgccacccacccagaacagggaccgcacgccccgcaagggccgctgaaaggaaaccataatgaaccagcaggaacaggcgacgaaacacgccgcgatcttccaggacaccatcaacggaaccaacgacccgaccccatggccggtgaccatgtgggcctcgtccggcgacacgatatggacggccggcactgcaaggacggccggcgaggactcggtgggcatgatctacgatcccggcgacaccatcgtgcaccggaacacaatcgccggcgacgtgacccgcgccaccgaatccttcgccatcagaccggcggacgggcagagcccgatggacgcgatgctcgcgggcatcgaacaatggaaccaccgccatcccgaccggtgggacaccgtggccacgccgggccagtaccgcatgacggatccgacgacgggccggcagctccctatgggatggagcgccagcctcgccgccgccgcgtccgcggcgggacggctcgaccccgacctgctccaggccagcctcatgcagaacgcggtcgagcacgagccgcgcccctgcgtgttcttcctggaggataacgggtacgacctcatggtcttctcctggcatcggaaccagcagggactgttcgacgcgatgagcttcaaacacctgcaatacgacgacctgagcatgcaggtcaccaccatcagccacagcgaggacatgagcgagcccttccccgccaagaccatgagcgacggcgaactgctcacacaaagccgcgtctaccgggacgaataccagcactggcgcgaacaggacggcggaaccgtcgcccagggcatgaccggccgcgtcatgcgcagcggactgctcaaaccgggactggagcagaagccgctgctgaatctgaacgacggtcgacgcgccccggactgggacgagttcaccgaccaggccgccatatccatcctccagggccaacccatctcgccgacgcccgcgctcccccagcaggagcagccggagcgggacaccgaccccacagccgtgacacagacgccggcccggacggccgcggcgacgaagcaggtctggccgaacgcgtgggtggcgaacaggctcgcgcacacctatatattgcatgcgaaggacggacgcgactggccgaagatgatcgtcggactcccccgcggcaccgccatcgatggcaaggacctgaccggctgggcgaccgacatgttcatgagcgcgaagaaccagaggcagaagaacgagggacgggccgtcaacatcaggttcagacccggcaccccggtcgagctgttcaccggccgcggagcggaacgccgcaccatgcaggtcgacccgcagacgctcgtccaggcggtcatcgacgcgcagaaacgcaaccgcgacgccgagaagacgctcgacacggcatcggtggagctcgcctcgaagaccgtggaggaatcctggccgcagatcgaacgcatgcagggccggttcacggaataccagcgtgccggcacgtacaagccgtccgtcgcaatgaaatgggcgcgcagactcgtcgaccggaccgccggagaggacgagggacggtggaccaaccgccaacgccgccaggccgccagactgctcatccaggaactcaccggcacgcaggatccgacgcaggccaggagcaaaacaacggatcgtccgaccgtcgaacagtacgtgcaggaaggcggcaaaacgccctacgccataggcgatgagacacccgcgccgccacggaaaacagagacggacatggcgacgaaacagcggcaagaccccatcgttcccgcctcgcaatccccggccgccggtccggaacgacggcacacggacctgaagtcaacgctcgaccggttccgcaccaggctcaagaagaacctcgacggactcaacgcagacccgcccaccgccggcaccgatcgtaaccgcgggcagcggaaaaccttataagaaaggagagaaccatggtgagaaaacgcctatacgcgaagcagaccgcctcggtcgaatacgagcagatcgacctgttcagccttctcgaggaggagcagcgacaggccgacaggacggcggaacaggtgcgcggatacgagataacggtgggccacgccgcggtgcaacgactccgcgcacgcggcgcggacgacgagacgatagccgccgtggcggccgaataccgggagaaccggctccgtggactcggccgacgggacgcgcggatcgccgccgagaacaagctcggcgtcggtgccgccacgcccggcgaaaccacgccgcaacctgtggtaaaacgtttcacacaatcctccggcacggaaaacaacactgaagaaaggaacaatgatggacgagatgacatggaccgacccgcagctcaaggcgcgctacgagaggaacctcaaggcgatggaacagcgccgggcggcgcatccggaactgttcaacaagtgggcgctgccgtacaaggtgttcacccgcagcagcctgcacgggatccagaacatgcgcatcaactggctgatggacaaccatccgcagcggttcagggagatgatgatggccaacgtgctcgaggagcatctgcgggacatcgagaggcggacgagggaacgccaggcgcagatcatggaccagctgatggagtccaggcacctgctcaaccggacggactgcctgaaggcggcaccccagatgaccgacctggaccggctcaacgggatgaacgaggcgcaagcggagtcgatgagcatggcgatccacgagatcgtggaaagcttctagcatccctcgactcgcaacgcgcgcgttcgccccgcgaacgcgccgaagcgaacatcgccgccattcggacactcaagacgctcgatgggaacggcgacgagcctctctccgcggagcagacggacacgctgcgcggatactcgggatggggcggatgcgcggacgcattctccgacaagcccgaatgggccgacctgaacgccgagatccgcgaactgctcgacgacgatgagtacacgcaggcgcgcgcctccacactgaccgcctactacacgcccggaccagtggtcaaggccatgtgggacgcgctcgacatcgggtccgcgcccatccaggtgctggaacccgggtgcggcaccggcaatttcatggccggcatccccgaaaacatcaaagcgaacgtgtcgggcgtggaactcgatccgatcagcgcgcgcatcgcggccgcactgaacccggacgccacgatcctcaacgcggacctcgcggactgcaccatccatccgggattcgacctgaccatcggcaacgtgccctattcgggcgacatcagcctcgactaccggaccacggacggcggcacatcccgcctccccctgcacgactacttcatcgaacgctcggtggacgcgctgcggcccggcggcgtcgccatgctgctgaccagcagatacacgctcgacaaacgctccgagaccatgcgcgccgacctcgcgagaaaggccgagctcgttggcgcagtgcgcctgccgtcctcgacgttcgcccgccaggccggcaccgaggccgtcaccgacgtgctcgttctgcgcagacgcgaacggacgctcgaccgcacgcccgacgaggcgtggatccactccaatccggtcgccgtgcccggataccaggacgtgaccgtcaacgtcaaccaggcggtcgccaacgacatgaccgcgcacgcggtaggcgacatcagaccggtgatcggacggttcggcggcgacttcgacgtcgtcttccagggcgacgcggaacaggtcggcgaacgactccaagaactgctctccacacagatcacccacggcccggcgctgtcgctgggcgaggcggaaccggccggacgggcggagatcacggtccgaccggaccatgtggcaccgttcgaatactccgtcgaccagcgcggagtggtctggtacggcgacggcaccaccgtcaccgagatagcccacggccagggcgacgaggcgcgacgcctgcgcggcatgatccgcctgcgagacctggcgcgcgagctccaacggctcgaactcgaccccgcccgcgtagacgacccggacgtggaagccaagcgcgccgaactcgaccgggcatacgaccggttcacgagcgagttcggacgactgtgcgaccgcgccaaccaacgcgcctacagcggcgaggaatccggctgccatctcgtcatggcgttggaggagaccgacgaaaagggaaggttcgccggcaaggcgaaatgcctctcgcaacggaccatcagcccggtgccgcccatgcccgaccatgccgacagcctggacgacgcgctggacatcagtctcgaccgcgccggcggggtcgacctggaactcatcgcgcgcctggccgacaccaccgtcgaggaggccgagaccggtctgggcgaccgcatcatccgtgacccggacaccggcgaggtcatgcccgccgaggactacctcgccggagacgtggggacgaagctcgaccacgtcacggccatggccgaacacctcagacgccgggcggcacgcgaggccatgacggagttcgcggcatccacctacgcgacatcggaggacatgcccgccatagagcaggcacgcgaatggatcgacaccgcgggaacggacgtgtggcgcagcctcacggacccgtacgccgccgaatcctacagggatccgacgccggtcatcgaacgcatcaacgacggacggcacggatggaccatgggctggaaccgcaacccggaactcgtcctcgccctcgtctggcgggcggtggaggaactgcccgagcgccactcacgcgtcaccctcgaacgatccgacaccggagagcggaagccgtggcacgcgccggcatggcaccgatcgcacggcaccagcccactgtgggacgcattgtgctggacatggcgcgacggcgacgcgccacagcactacgcgccgatcctcgccgaccggcgcatgcccgtcagggacctcgccctgttcgtccacaagatcgcccacaccgaccggctcgaaaccgccgacaagaccgcgatcctctccaacctgttcgagagctattcggcccacgacaagcatggcagcacgatatggacggacacgaccatcggcgcgatggcacgccgtctcatgatcggcaccgacgaccccacgcggctcgtcgaacggctcgccaccgacatgtcggtcagcgaatggatctggggcatcgcccgcgacctgcccgacctgcgccagggagcggcacacgacgcctacggcgcgccgccacgcgccatcgacgcgcgccccgacgactaccaggcgttccgcgcacgccgcgaggaacagctcggacaatggcgggagcagccggagcacgccgaggccgcgcgcgccgaccagacggacgcggaacggctcgaacacgtggccgatctgctggaacgcgtacagcccaccccgctggagaccgagcagatcaagacgccgctgggggccccgtggatccccgccagggacgtccacgacttcatgatggagacgttcaacgtgcgcggccacgggctcacgcccggcaagctctcccagtactcggtcgactggatcccccagctcggacaatggcgcgtcggctactcgggcggcggcgacatcgactacaaggcagcaaggacgtacggcaccgaggaccgcaacccgttccaactgctggaggcgtgcctggacaacgcgcagatcaccgtcaccaaggactcccccacggaaaccacggcgtccggcaagcccaaacgggtcaaggaccagaaggccacgatggccgccatcgagaaggccaacgcgatccgcgacgcgtggaaccaatgggtgttcaaggaccccgaccgcgcgcaaaggctcaccgccctgtacaaccgcagattcaacggcatgcggccccgccacgtcgacggatcctacctgaccacgcccggcatcgcccacggcgtcgccctgcgtccgcatcagaaggacgcggtggcccgcgccctgcgcagcaacgaggggaccctcatcgcgcacgtcgtcggagccggcaagacgttcgagggcgttgccctctcccacgaggcgaaacgtctcggcaaggcgtccaagccgatgctcgtggtccccaaccacctcgtggaccagtgggccggcgacgtgctcaggctctatccggccggacgggtcctcgtcatggacaaggacgcgcaacgcaaccccgaatcggtgagacgcttctggggccgggtcgccaccggcgactgggatgcggtgatcgtgccggagagccggttcagccagctgcacgtcagcaaggaacgacggctgaggaacatgcgcgcccgcgtcgacgagttcgcccaggccgtcgaggccgccgccaaggccagggacgacaaggaccccaccgtcaaacggctggaggcggcgcgcaaaagcgccgagaccgccatgcagcgcctgcgagacggcaaggagtcgcgcgacgacaaggcactggcgggcatcgagttcgaatcgcttggcgtggacatgctcatcgtcgacgaggcccaccacttcaagaacctcggcgtgcccgtcgcatccgccgacctgggcatgcaactgtcgtccgccgcgaaatgcgaggacctgctcgacaaatgcgaatggctgcgcgaggccgggcacggaggcaacatcgcgttcatgaccggcacgccggtctccaactccatgagcgagctgtacaacatgcagcgcgggttaagggtcaaaatgtgtgtctggctcggcgtgtcgcgggggttagatttggcctttttgaatgccgattgagtgggtgtagtcggtgtcgatagcgttgtcgtagagggctgggcgtcctgtttcgtggtcggcttggttctcggtttgggtcagggtggatactttggcgagttggccctggccccagtcggactgcctggcgattcgtactggatcgtcaggcagttccgtttttaagtagagccaccaatccagcatgcggcgttgtcgttcgcctgatctgccgcggtgggttctggcgagcagtttgagctgggcgttgatgccgccttctaagctgttggtggtggatttgatccgctcgggcgcaaggactcctgctggcgggttgaggtagacaaacagcatctcggaccgccaaagatggttgaggctgttgtaggccttgcgcacgttgtggtgggtccacacgcgggtccatgcacctgttttggggtctttgatcatggttttctcgttcatccattcccggtagatcgttgaaaactcgtgcagttgcacaccccacgcggcggcttcatccagtgtggtgatccgggtcagtttcagcgcaagtcggtagatggtgcgcccggcatcggtgcgtgggttggtggtggtgtagcggcggaccacgcgttgggcgtggacgaggcagcgttgaattttcgtagtcggccagcactttttgattgcgctgtatgcgccttggccgccgtcgatgacggcgatgagtggggcttcgatgcgttcaagcagcagttggtagtcgcgggtggtttcgtgtttgcaccagtgccaggcgatcacgtggtcgatggtcgccgcgacgatcaggcagccaccggcggtgtaggtgccatcgagaaatacctggtcgtagatccgcttgtggtggccggcggtggggtcaggcacatcaacgagccagcaccacttgaagcgccgcttcatggtggcgcggctaacaccgtttcgtttggctaggtcgtcgagtgatattgcggtggtgcaatgctcgatgaactgggtgaacactgccgcgttggtgatgtcgtttcgacgtttgacgctggaggcgccgcattgtttgcagcgccatctggtggtgcctttgctggtggtgccgttgcgtttcatttcaccgccgcagtggcagcgtggttggttcttcgacattgcgacaccacaccacgccgcgcatagcacatcacggctgccacaccgaggatttcccgtcgggggctagatatatgcttccggagcatatactttccggaaacctacaggtcaatccgtgaaaatccgcgattccggacacactttttgacccttaacccgaaccctcaaggcccagggcctcgacacgttcgccgcatgggctggcgcctacggccaggtagtacccaccgtggaactgaagcccgaaggcaacggattccaggtcaagcaaaggttcgcgcgcttccagaacctgcccgaactgatgaacgcggtgaagcagttcaccgacatgatcaccaacgacgacatccagctgccgctgcccgaactggagcaggtgcccgtccccgtgcccatcaccgaccgccagaagaaggagatggaggaactgtccgacagggccgacctcgtgcgcgacggcgacgtgccgccggaggtcgacaacctcctgcggatcactggcgacgggcgaaagatcgccctcgaccccaagctcctcaaaggccacgagaacgaccgccccctggagaacggcaagatccaggcatgcgccgagaacgtcgcccggatctggcaggaggagacgccacgcctgggcacgcagctcgtcttctgcgactctagcacgcccgcgtcgggcggatggaacgcctaccaggacctcaaggaccgcctcatccaattgggcgtgcccgccgagcagatagcgttcgtgcacgacgccggcgacaaccccgccagacgcgagcaactgttcgccaaagtcagatccggcgagatccgcgtgctgatgggaagcacccagaagctcggcaccggcaccaacgtgcaggaacgcctcgccgcgatccacgacctcgactgcccatggaggcccgccgacctggaacagcgcctcggccgaatccagcgccagggcaacacatacgaccacgtgcgcgactaccggtacgtgaccgagggcacgttcgacgcgtacagctaccagaccgtggaacgcaagcagcggttcatcagccagctcatgagctcgaagagccccgcccgcgaggccgcggacctcgacgccgacgtggtgaccctcgccaacatcaaggcgctggccaccggcgaccccgacatccaacgccgcatgacattggagaacgagatcaaccagctgaagctcctgcgcgcctcatgggcgcagcagaaggccgacacccgcagggacatcaaccagcagctccagccacgcatcgaggggatccgccaggcgatccgcgagaagaccgacgacaagccgctcgcgtccaaggccctgaacatccaccagaccgcacgcatgaacggcaagtgggagggcatgaccatcaacggccggccggtcggcgaccggcagaccgcatgcaggctcctccaccaggccgcccaccaggcgcacgacggggacacgatcgccgaatacgacggactgcccgtcatcgcacgcagggcggccaccaccggacggatcaccctggccgtcaaggccgtccacgagcacgaatccggtaccgagatgcccggaccctacctgaccggaccttccagcatcgtcagccagctcgaccggatcgtcaagaacatggccaccgaccccggcaagctcacggaacggctggcggacgccgaaagggaactcgccgccgcgcaggagacgctggccgaaccattcgcccacgaggacgagtaccggcaaaaacaggcagaactcgaacggctgacgtccaaacccgacgaaccccgggagacggaaagtagagaccaggaaaccaaggaaaggagcgcaggaatgccattgacaacggaaaacgccagacgactgctcgaacaggaccacgacgtcaccgaagtcacccagggcggcaacgccatgggccactacctcgaagcgaggctcacggacggacgcgccgtgcagatcgacttccacgacaaccccgcatggaaagacacggaccgtctggccggccggatcgaggtgtcctacgccaaccggccacaggcggaatggcaatacgacgacaacgacatggccgaccgcgaacacaccgtcatcgacccggccgacccagccgccgggaaaacactcgccaaggcggtggagggctgggaacgcgcgggcggcctacacacggcccgcgcagccgggacgagccatctggccgcgaaccagccgccggaggaatacgcctaccggtggcggaagcccggggaccccgacaggcacatcgcatacctgagcaccgccttcgaccgcgaccaggcgatgaaggcgagggaggacgccggatacgtcgtgacgaaggtcgatgaggatccggccgtgctctacgagcagcaccgcaaggcgtcctgcatgcgcgcgagccacatcctggaacgatacgaatcccccgaccaggacgcagtcagaatcctccacggcatcgtgggcgaggtcaacgcgcacgaccccgagaacgacatcgccacctacctcgcctacccatccgacaaggcggtccaaatcgccggagacggcctcacctccgcggacatcgcggagaaacgcgagatgggcggatgggacccgcgaaaggacccgctcatgcgcatcaacgcgcagggcgactggacgggcatcacccaacaacaggccgaccagatcgtctgggacaaccgcgatgagatcctcacccgcgcgtcatacgacagtgaactgtccacgtggacgctccaccagcttgaccagttgaaggagccccagccggcccaaagcctggaccgtgaccggccggaaccggatcacaaggcgcccgcacaggccgattccacgacgaagcgtcacgggccaagactgtagtcctctccagccacggggtggcgcgctttccgcgccaccccgcattcattccatacgaaggagcagaagacacgcatgacaacagaaacaaacgaccagccggaacccatcatctggttcgagggcacactcatcagcagcccacggcaaaacagaagcgcggaagactggctgcttgaaaccatggccatgggaacagccacgaggaaaatcaccatccacgccagcggcagggagcattcggagaacatccgcgaccacgcgcgcaagggatcccgcctcatggtcaaaggcaccgcgggcgacgaaggatcaggcatcgacatcgaagccacaagcctcgcgttcgatcccagccatgacgaaccggacgggaatcgatgacacggaccaccaccgtcagcggcatcagaccggacaaggccggcgacggcgaatggatcgacatcaacggccacgtcggccgactcatgtccacgctcatggcagacggccggccattcagcatcgacgccgcgccgggcggcatgaccaccgtcacgcccctcccacccccgaaggacgcggaagcggccggcggcgacgcccaggccgaaacggagccggccgacgggaggatcaccagcaggaagacgctgtacgaccggttccgcgccaggctcaaggagaacctcgccgaaagaaaacaatagaaaggaacaatcatggaacaagcaagaggaatcatcgtcaagacgctgaccatcctcgcgggattctggctctccgacctcgcggccgcccgcgtccaggccggcatcgccgccggcgaaagcatggaacggatcatagacggcatgacgatcatgctccagcatccgctcgccctgggattcgaccgggccagcctcctatgcggactgggcggcgcgtgcgcggtcggcctgttccacctctaccggtggagcatgagacgcaactggagggacggcgaagagtacgggtcggcacgctggtcgaccagccgggagatggccccgtataccgaccgcgacaccaggcagaacctccagatgacggccaccgagggcctgagcctcgacgccccggccacgcgccgcaatctcaacaccgccgtgatcggcggctccggctccggcaagaccgccacccacgtcatccccaacatcctcaagggcagcatgaactacgcgtgcaccgacccgaaaggcgaactctacgcgaagaccggcgggaaaaatgggctacacggtcaaacaactcgacctggtggacctgaccagcgagacgaaattcaaccccatgcgctacatcgaccccacgaaacccgacgtggcgatcatgcgcctggtcaccaacatcatggacaacaccaacggctccacacccaaggagcaccagaccgacgacttctggaccaaatccgaacgcagcctcctgaccgcactcaccgcgttcgtctactacctgcccgacgacatcctcaaggactgcctgcacatcgacgccggccagaccctcaacgcggtcgccgacatgcgcgacctgctcgaagccagcgaacaggacgagaccaaggaaagccaggtcgacgccgtcgctcggaccgccactgaaatatacgaggagacccgcgccgaatgggaacgcgaggacgcggaccacgacgacccggacctgcgcgaggcatggcgtctcgcccagggcctgaagttcgcggcccgccagtaccggcccttcacccagggtgccggagagaccaagaagggcatcatcatcagcctcggcgtgcgcctcgccccactgaccgtcggaccggtccgcgagatcctctccgacgacaacctcggcatcgaccggatcggcggataccaggacgagcacaagggcggatacaagcatcccaacgggaagacgaccatattcctcgccctgcccgacgaggacccgacattcaactttttggccgcgatcttctaccaatgcctgttcgacagcatcatccgccgctgccgcacctaccccggcgaatgcctcgccacgccattgcactgcttcctcgacgagttcgccaacgtgggacgcatccccaacttcgacaagctcatcgccacaatccgctcgcgcaaggtcagcgtcagcatcatcctccagaccatcgcccagctcaagacgatgtacaaggactcgtgggagaccatcgtaggcaactgcgactcggtgctgttcctcggcggcaacgagcagtccaccaccgaatggctcagcaagctgctcggcaaggagaccatcgacatccgcaccaccagcgactccaagggcgtgtccggcagccacaccaccaactaccagcgcaccggccgcgaactcctcacacccgacgagctcgcgcaattggacaacgacaaatgcatctacaacctgcgaggactgcacccgttcctcagccgcaaggcatggcccggaaccgccatcgccagaccgaaatccacgctcaggcattccaaagaatggaaggcagcggcatgaagccaatcacaaccccggatcgctgccgggcaggccggtgcccccgtctgatggcgcgggcacggaccatcccggcgaggctccgcccgtattggcggaggacgacgagcctcccgaagacggacgtcgaacggtttcggaaccggatccggaacttccttgggattgggattggcttcctcccgaatatgagggcgtttgccgctgtggaaccgattgggattgcgatgcctgcgcgctgctgcgcggcggccgcagcggcttcctgttctgccttggctttcgcctccgcgtcggccttttccttcgccatcttcgattcgttgacctctttcacagcttttgcgatggcgtccgcgtcgcgttttttgatggcgtccagcaggcttgcgcgggtcttgccgtccgccaccttgccgtcggtctgcttgtacagcgcgttcgcgtcgtccacggtcttgtcgagtttgctgtcggtgacgaccttggccgcggtcttgaggtcggtgagacggttcttgagctctttggtcgttctgcgcagcgccgcagtggtcctgtccacgtcggatgtgacggcgtcgggcgcgcaggaacccttgatggtggacgtctttgcgtccaggagccgattcaacgcatcaagcgtcttgggatccgcgacctggccgcgactggtgtccttcaatagtctggaggctttggccgtggtcctgtccaggtcggactggacggtcctgcgtgtcgcttcggccgagtcgcatgcgctgattgcggtctcatgcgccccttgccgcatggcagcggcacgacggtttttgatttgcagtcccatccaggacacggcgatgaggctcgcggtcatgacgatcgcgacgagcgctttcccgaccgggaagacgcgacgcaccttcagatcgtcggggtcggccgagtaggtgacggccgaccccgacgattccgcttccggtattggagggatgtccgccgtatccgattccaagtcggcgattcgttcgagtgcggcaaaatcgtcgtcggcgtccttcagggccttctccgcggaatcgtcgggaggagactgctccgccggcgcagacacgggttcctgccccggctcgtcttccggcggcagcggcgcggacggtatggcgacgcgacggcggccgcgcatggacgcgggcggcagcggcgcggcaccggccgtgtcaaagccttgctcctgcgcggtatgccaccattcggcgagctccggccacgcgtgtggatgttcggcgatcaggcgcatccatggacgccaaccgggctcgttggccatggcgtacagctggtcgaccgtaagcttggggctgagaatcagctcacccgtcttcctgtcgatcctggtcattcctctccgccctcgtctttgatgaggactggctgatcctgttcgtttgccttcatcacttttgttcctctggtttgccttcatgcacccggtatccgccttccaatgggcccttgaccgccgcgcatcgccagccgtcgtcagtgagcgtgtagtcaagcacccaggatgcctccagcccggtggatacggcgcatgtcgccacccgccgccccgtggacacggggaagccggtgaactcggtctcgggcaatggctgcggggctatggatgatgccggtatgtcgaggccggcggcatccggcgtgaagtattcgccttcgagttggcctcgttcgccgcccatgtagacgccgagcgctttcggcgcgaggtcggcgcacggatcatcctccgtcggcgtcgccggctcggtctcttcgtctccagccgttttttgtccgggttcggttttcgttcgcggccgggcgacggtgctttgcgtgtcctccgcggttccgttgccggcgcatatcaccgcgacgtttcctcccaggatgaggagcgcgaccgcaaatcccgtcgcggcgatgatcctgttcctctttggttccatgcttggttttcctttcaatggatgtagcggacgccatttccggctgcggccagttgggaggcgctgatttcgcgtgtggatacgacgccgaggccaagcgcgttggactcgctgatcaggatcgacccgtccccgcggacctcctcgaccatggcgacatgcccgtagtcggcggacgcgcccaatactcccggttggaacacgatgacgctgccggcggatggggagccgtccaccgtgtagccggccgacgccgcggaacctgcccatgtggcggcgttgccccaccctggtatcggttttcctatgtcggctcttctggtcgcggcccaccaggtgcactgcccccatgggtatctcgtgtccggcgtgatgccggccgtggacacgatgccgccggagaccgtcagtttcggttcgagggagccgaccgtgccaccctcggcggtccccgttgcggtgtatttggtcgctgcgagttccttgatccgccgcacatagttgatggtttcctcgaagggcggcaccatgccgtatctgagcacgctgccgaggccggcgttgtacgccgcgagggtcagctccaacgtgtcgccggtcagcttcccggacttcttggccgtttcgacctgcgaggcgagattgcacatgtagttgccctggctccagatcgcgtcgtgcgggttccagatgtcggccttgccgtcgccgtcgccgtccttgcccgcggacgcccatgtggacggcatgaactgtgcgatgccctgcgctccggcggagctgccggccttcggattccaattggactcctggtcgatctgggcggcgatgatgctcggcgtgacgacctggcagacggatccggcgcggatcacgtcggcctcgtattccgcgggcacgcccgagaccgtggattcgctggcgttggatccgaggaacgcgcccatgacggccaggagcacgccgagcaccgcgagcatggccgcgatgacgggcaggatgggaaggctgatggaggcggctcccgcgatgacgcgggacgtggccatgcgcacgaagttcgcggcggcgcgggcggcacgcacggcggcctgtccggtggcttgaacgtcgcgcgccgccttgacgggcgcgcggcggtgccgccagatgaatttggccgacgagttgacgcctttcacgcccgcgcgtgccgctttgaaggtcaggtcgcgtgtggcgcttcccagcttggacgcgaaatcgtcgtcggcagcggtgagcctcgcgccggcttcgtccatccagcccatgccggtggatcccatccgtttgacgctacggccggcgttcccaaggcccgcgcctatgtgcttgccgatccgcttgctcgctttgcctttcgcggcgaacttgccgatcttctcgctgggcttcgcctcggacagcgccttgggtttgccggccgtcttgcgcattcccctgcccggacgaagggcgcgtttgccgcggttcatgatgcgccgcgccttgccggccgtccagcccacgccgtgcatggtggaggacatgccgtacatgccggcgcgtcccgccatctcggcggcggtgtggcccatggaatcggcgatgtcggcccggtccgagccgaattgcgcggcgctggacaccacgccggtggccgcgcgtccgatgcgggcgcgtgtgcctccggcgtggtgggcttgggttccgctcatgcgtttactttccttcctggaaggtcgtggagtacagccggtagaggtcgccgcccgcggggatgcgcccgtcgaacggcacgtaggcgctgccgatcttcatgagtccctggccgggcagcacgccggtgaagtactggcgctgctcctcgctcagggtcagcagctcgcacaacgcgtccgcgtccgtgctgttctggctcaggagcatgaggaaatcgctgttggacagcatctctcgcgcgtcctggaggtcgaggatctcctcgacgttctgcgtgatgccggtcacgccgagcccgtatttgcgggcgcgcttgtagatgtccttgaactgggcggcggcgtactggttggagaagaagcggtggaactcgtcgacgtacagccaggtgcgccgcccgttggccttgttgcggatgacgcggttccacacctggtcgatgacgaccatcatgccgaacgtgcgcagctcgccggacaggccggacacgtcgaacacggtgaaccggttggacaggtctacgttggtctggccgttgaagccgctcatggagccggtgatgtacgggttgagcgcgtcggcgaggtaccggctcacctggtcgccgcccgcctgcaattcgtcgtgcaggtcctgcaatgtgggctggaccactcccccgccctggttgcggtaacgcgtgtacaggttgctgacgcactggtcgacgagtcccttctggagcgggtcgaggccgtcgatgccgccgatgagcgcgccgatcatggagaccacgttgttggtcttgtccttgacggggtcggaggccgaatcgtcctccaggacgatgtccatcgggttgacgcgcgtgccggtgccggcgctgatctggatgatctgtccgccgaacgcggccgcgagggcgaggtattcgcgttccgggtcgatgacgatgacctcgtcgtcacggttgaggaacatgccggcgatctcctgtttgacggtgaaggatttgccgccgccggacgtgccgagcacgaatccgttggagttcatgtggctgcgccggtccgcgaggatcgggttgccgctccgggcgttcgacccgtagaacaggccgtgcggctcgaacacctcctgcgtggtgaacgggatgaggatggccgcgctgttcgtggtcagggtgcgtttcatgggcagggggttgttgcccagcggcagttcggccgtcaggccctccatctgcatgaacttgaggctctcggccgtgcaggactgcgcgttgaccttggccttcacgttcctgcacgcgacctccagctcctcctggcttgccgcggacacgccgatcacgatgatcgagtccacgagcctctggttggtggagcgcagctcgtcgcgcagttggccgagctgttcctgctggtcggcgaggtcgtcgggaaggtcgtcggggtcgaggccctgtttgcggttcttgcgccgctggtccatgatctgcatcttgacctcggcgttcttgcggcgcacgagcgtcatgctttcgccgcggtccatgggcgcgaggtggatgctcacgtcgacgcgggcgcgcagtccggtcaggtcgttgaccagctggtcggacagttccggcggcaggctggacacccacatggtgcggtgcaggtatttcgagtccagggattcgatgtccagctggatgggatttcgcgcgtcgatgctccacgggcacacgaggtccttggtgtcgggtttgccgggctgatgctcgaaacggcgttcgtcgaaccggaactcctcgccgggccggagcacctcggccatgaggcgcagccggtgctcgcggtcgagccgggtggccttgcatgcgtcgatggagcgcatctggctgacgaggttgttgcacaacgcgttcagggtcgcgacggcggcctgctcgtcgctttcgcggacggtgacggtcagggtcttgacggtgctggtgttgcggctgacggattcgagtttgccttgggcgaggcggttgtagtcgagcctgtagtggtcgaggctgtcgccggtctcgtccatcatcacgtcggcgaggatttcgcgcacgccgcgtgagcgcgtgtaggaggcgatctgcacgctttgcccggcctcgaagctgttgatgagcttggcccaccggtcgatgatttccatctggtgggattcggggctcagctggtagttgatgtcctggaagaggatggtggcgctccaccgtccgtcgtccaggctggcgatcccgttgcgcagcatcgcgtcgtagccgatgagctgcttgacgcccttcggcagacgcgtcgccttctttctccgcattcctcacctttccttgatcgttggtttcgcgccggtgcggtatggtctgccaggaccgtcgagcaggtagacctcgcgctgcgtgtagtgacgcaggatgtatttcaggtatttctcgggcatgaggccctttggcctcacccatccccatacggctatgggcaggccgggcgggaagatcaggtacatggcgaggttggggtccatgcccagcccgagccacagtccgacgtatcctcccccgcacacgatggcgaggatgacggcggcgaggcactgccgccagctcattcccatgaacaccttcgattcgatggtggtcagttccctgtagacgggcatctgcaacgccatgattgcttcctttcgtggattgcgttgtgtttcattcgccgccgaagagcttcttggcgacggagttggccgccatgacgatgccgatgagcatgacgctcgccaggagcaggccggtgaagttgtccatcacccagccggagaggctgtcgccgtccttgaacttgctcgggttgagcgtgccgcccacgagcgtgcggtacatgaggatcgccagatacagggtcgcgcattggaacaccagcgacgcgtactgtttgaagtagttgatgccccactggcgggtctcctcctgggcgacgaacgcgatcggcagcgggttgaacgcggtgagcatgtatatctgcacgaaacgcaggagaatgacgacggtgacgacgatggtcgcgcccttggagacgaggaacgggatgagcagcaggatcaggcacggtatctggcccatccagccggcggagtcgatggcgtcgcgcatgctgtcgccaaggccgaggcccgacgatgcgccggtggtgggcgccgccgaatggatgccgccgagcacgctgtcgccgatctcgtcgatggcctggagcatgagctcgctgtgctgggccgcggtgaacacgagcgtgagcttgaacatcgccatggcgacgagcttgacgcccagctctcggtcgccgtccgtccgggtgctgaccctggcgagttccaggacgcacatgatcgccagtatcgtgctggctatgggtttgaccgccgagcgggcgacggtcaggctcagctggtacatgcccgcgttgtattcggcgggggtcttcagcaggtcggccacaaggtcgtcgccgacgccggaccctatcgagttgaggatgccgacgatgaaatcgaccatgcgcggcctcccgtctacagggcgatgttggagaacagggccgcggccgcgatgatcaggccgccgccgacgacctgccagacgcccgactgggtggcggggccgttctggtccttcagtcctccggccagggtgatcacgccccacacggcccacaggccaccgccgatgatggcgaactggctgaaaagctgcaacgcgctggtgacgacgctgccgctgtctgccgcgatggtggttccgtacatgatggtttcctttcgacttgttttggatgacatgaccacggtatggccgtcgagaaggctccggtttggacgttcccgacgaacccgaagaggctcggacgatggtatggaaaaggccccgccgaccgttcgccggtggggtcgtcggtgagcttgaggtccctggcccggaaccacgcgccttcacccgtgctggaatcgaccttgctggtgttggtgatcttgaacgcgatctccagcgagtcgccgtccatcttgagcgcctgcttgacgtcgtcgcggtcgccgagcctctcgccggatttcacgtcgtacttctccaggtgcaggcccggggtcatgtccggcgtgcgggtccacacgacgttggattcgaggcccttgtcgttgaagtgctcggtgaaccggttctcgacgcggccggcggtcttgatgcgcttgcactggatatacgcggtccagtcgttctcgtgctccacgtcggcggacacgagcgcgcggtacgcgtccgtggcggtgatgacggcggtgccgtccttgtagtcgagggtgaacaggtcaccgccgaacttctcggaatcgaagccgctgccggcgagcttgtcgcccttggccgtgatcacggcgccatccttgtgcaggtcgcgcgccgcgtacacggcccacacggcccacaggccgcctccgatgatcgcgaactggctgaagaggtcgagcgcgctggtcaccacgttggatcccgccgcgaggatgatgctgtcatgtccgttcattcgtccctgccttctttccttggcttggcttgtttgacaggtcaaaggtaaggcgcgcgcgacggggccgggtcggacaccttcgcagggggacgccgcatcttccgttggatatggagcagttggaacacttttatctcaattgaatcagaatgtcccgcgagcttcagcatgttgcggaatgtcaatagactatacttggcaaacgtggaacaggattcagatattaaagatgaaattgtccagcttgttaaatttggacttggtgggcagttgaatgactttcgtatgtacgtgtctagattgatacgcaaatacagggtcggtgatgcgtcgttctcaaaggcgttggaatcgttacttcagtccagcgatgtgcccgatatgacaccgataagggaattaggccatgcgtcacgtcggactggggaggcgccgatccttcccgtgggccaacgctccgatgtggagaagccattcctgcctgagcggattgtcaaacaggtagagggactgctcgaggagcgcgagaacgcgtcggtcctcgcccttaacggtctttccccgacctcgacggcgatttttaccggtcctcccggagtggggaaaaccatgaccgcacggtggatagcctcccagctcggaatgcctatgtaccggcttgatctggccgagacgatcggcaggcatctcggggagtcgggcaacaacatcaaagcagcattttcgaaggttcgtgtcactccgggaattctcttcctcgatgagatcgacgccatcgcgaagaccaggtcggacgactcggacattggcgagatgaagcgcgtagtgactgttctcctgcaggaacttgatgacaggaacccggcgagcctcatactcgcggcaacgaacaacatgtcactcatcgatcccgccgtatggcgtcggttcgagttacgaatagatttccctatgccggacgagaagcagatcatgaatgcgcttgaaagcgatttcagcgcatcggacagtcttggaggggtttcggccccgtggattgaagccctgggcatcgtgatgaagggggcgcctttcagcgaggtgagatccgtcgcgatgcgcataaggaaacggtgtgtgctgaggcggtgtccggcggaggatgccataaccgaatacataagggagaacacggaagggctgacccacgcgcagaggattagccttgcggtcgcgctcgtggagaccggcgcggtgacgcaacggctcgcctccgagatgaccggggtgtcgcgccagactatacgacgcagaactgagaaaacgaattcgaaaggatgattcatgggacggcattatctgataggacacggcgaacggctgtctgaaccgattgttcttccccgcggcggggcgacgccgaaagatatctacacatacgaggaatcgcgtgcgcggttgcagccggaactgcacagtgcgattgcaaatctgccggacgatccggccctcgcgccgaatgatgtgcacgtcttgcagatggtgttgcatccgaagtatctggcaaagtcttatcatccatccgggctgctcagggcggccggcctgtccttggtgggcagcaagccggtacgaatcacaacggccgacgatccagacaaaggtgcacgtctgtctaggacgttgctggtggcgggacacaggcaatcgctggagcatttcgattccctgctgcaggaccccggcgttcgatgtgaagagtacgcaggtatcaaggacatcgtcagaatcgagcgtatcgacaactacgcattcgatgacaagtatcatcccgcgccttccaatgacgcatggtacgaactggttctccatgagctggacgaggatttggcgccagataatacccagaagttcttggagctcgcggaaaggctcggagtaaacgtcgaagagcgaatgaacttcaaggccaataatctgttgtatcttccgattcggggaccggaagaagccgtcaaacggcttgctgaatactccagcgtccgcgctctgcgcccaatgccgaggttggggctgagcccaatcagctccgtgaggagcattcgggaacccgttacgcttcccgaacctccgagtacggcgtctcagctgggggttgcggtgcttgacggagggctgccgccggataacccgatatcgtcatgggtggactatatcaaggcgaatcccgatgccgatgatgacgagcggtttttggaacacgggttgggggtatgctcggcgctactgttcggcagccttaagtccggccagcagccgctgcgcacgcggataacggcggtgagggtgcttgattcagaaacgaggtccgatgatccgatcgcgatgtataaagtgctcaataacatcgagaatgtgttggaatcgtaccccttccactacgtccaatctcagcctcggtccagatttgccgattgaggatgacgatgtgagcgcatggacgtcggttcttgaccagattctttcttccaaggacatgctgctcagcgtggcggtcggtaacaacggtgaaggggatgccgaaagcgggaacaaccgcatcgaatcaccgggtgacgcagtcaacgccctcggagtcggggcgtgtgattctgaggatgtgtattggatgagagccccgtattctgctgtcggcccggggcgaagtcccgggatcgtcaagcccgatttggtggcgttcggcggaacggagggcaatgaattcatggtgcttggccctggaacgtcacctgcagcggtaccggttatgggaacgagttttgccgcgcccaacgcgctacggcaggctgtgcgtatacgcgagatctgcggcccggaaataactccgctggtggcgaaaacgctgctgattcatgcagcggaacgcagaaaggaagacaatatgagcgaaatcggatgggggaaggttccatccgacgccaccgaaatcgtcacgactgaggacgggcgtgctcttgtcatctacaagggcagcatcaggccggggaagatagtgcgggcgaccatacccgtgccgccacggcttgatcatggtgacgtaaagattagagcgacgttttcttttacctgccgggtggatccccaatccccggattcatatacgcgttctacgcttgaggtcacgttcaggcctgacgcgaaccgaattgatgagggaaagaaaacggcaaggaccgattccttcttcagccgcaaccgcatgggaacgtccagtctatatcccgtagaggccgagagaagatcggatcaggggaagtgggagacggtactgcactccgagaggcaattcaaggcagcgagactcgccaagccggtgtttgacatccactataacgcccgtgaagagggtggcgcatcgctcagcgtaacggacaagttggaatacgcgcttgcgattacgatttccgccccaaagatcgggaatctccatcagctgatactggacgcatatccccagctgatttctcttgatcctctccttggcgtgtgacgcgcgtttcgtcggggttcgccggtgtccggtgtccgacggttcggtgcgcaagggaaaggggtggcaggccggatccgacctcattgggatccggtctgccaccccgttctggtttccatggtgcgcgggaaggggttcccgcggcgtgcccccgccgggagtcaaacccggcgccgtcacaaaggagaaaacaaagacggtaccggtgggggccttgggcgcgtccgggaagggaaaggatctgggcgcgtccgtgggcccgtgcggcggatcgtggggggcggtccgccgcgggcccggggtcaggttcgtcggatcactcctccgagccctcggtgtcggccggggccttcgcctcgcgtcggcgggacgcgatcagcagggccgcgcctccgctgagcacgacgaccgcggccagcgcgatcagcgcgatgcccgcgccggtctgggcgaggctcttgcggtagccgttccagtcgtcggtggcggactccaccttggtgtccgcgcagtagtccttgccgtcgatggtcacgacgtcatcggacttgctctcggtctcggcctcgggcttggagccggattcgtcgtccgaggtgccgtcgccgaatggggccgacgtgtcgaccggacattcggccaatgcggtttgcctgtcagccatgtgcaacctccagaggaacgatgatggtgcgaacaatgtcagagtcgatgatgcgccgggtcgcgggccgctgcggggcgcaccgtcacaggccccatcgggagcacggctccacgggtccacgggtccacgggtccacgggtccacgggtccacgggtccacgggtccacgggtccacgggtccacgggcatgggaaaggccctccgccgggagaggctggcgaagggcctttcccatgcccggaacccgtcgtcgtaacgtctccttcgatcctcacgcatacgaaagaaccgcacctccgatcatcgaatctgaatttcttcagtccaacaatcggggtgcggttcagcttcggccgagagggaggacgtcaccttgcagccggtgcaaaagaaaaggccgggcggggaatccgctcccctgcccggcctttctactgtcctaccgtggccttacttcctgtgccgcgcggtctcggtttggtttccgcgacggcggaacagcatcaatcccactcccaagagcgtgaacgcggccaacgccacggtgggcgcggatacgccggtcttggcgagttggcgaatcgtcttcacgatggccggggtcgccggtggaatgtaggagttggtgaactcgggtcgggttccggtgacggtgaccatgccgggggtcgtggacggcttgtccccgacggcatcccccttgatcctgtcggccttgtcggccggcgtggcgctggaatccttcgtcttcccgtccgtcgggtcgtattcgactttggcggtcagattgccttgcaggtcgtcgcccacggtgacggtcacgtggtgttccgtcctgtcgtaggtgacgttcttctcgccggtgttcctttcccgaatcacgtaccgctgttcgccgcaatcgtcgatgccgttgttgtcacgaccgtaggtgagaggcttgaaccggatgtcgccgtccttgtcgttccgttcggtgtcgatgaccttgccgtccctgtccacgagttcgaactcgaactcgtcggccttcagcccgcgtccggtcagacgcttgcgtgcggtgagttccacgagcacgttctgcggctggtacgtgttagtgaagcggatgccgtcctcggaaccgttttcggtggagtattcggtcttcgcggtcaacgtgtgactgtccgcatcctcggtgacggtgacggtgacggtgtggctggtggtgtcgtaggtgacgccgccgagctgggtgtccgtttcgtcaacggtgtacttgtaaatgccggtcttgtcgaacgtgagcttgtcgaaggtgagcgtgccgtcgccctcgtccgctttcgcctcactgccggtggtgcgcttgaaccgcttggattggagcgtgttgccgtccatgtccttcagttcggccgtgaactcgccatcgttcagggcgcgtccggtcaggtgcttgtccgccttcacggtcacgtcaacgggtgtcggcgtgtacgtgttgtcgaagcggatgtcattggtctgactgtcggcggtggccgagagcatgccgtctcggtcggtgacggtgacggtcacatcgtattcctgagtggagtagccgatggtcttgtccgttccggcgagttccttcacgtgatacgtgtatacgccgggcatggtgtagaccatttggccgaatgtgaatccgcttcccttgttggtgacggttactgttccgttttggcttccggctggcattggcatgtcgttcatgctgatggcgttgccgtccgaatcatgtgcggataccgcgttcaactggaacttgaattcaccgtcttgtggaacgcggctggttgccgtatccgtgttgacgatgtttttcacgccgctgatggagtatccgacgttcttcggactgtaatggttggtgaacgtgatgttcttgccgttagcgccggtggtcggggtgacggtcttggacacgacggccagcttgcccgtatggtcaacatcctcgaccacgtaggtgatggtcgcaaccgtcccgtccttcgtgacgcccggaacggtcgtatcctgctccgacatggtgaacacgtaggtgccgacgagcgggaacgacagttggtcgaatcggatgttgccctgccggtcgttccgtttcgtctggtcggcgttcgacacgttggcgggcgcggactgttggtggagcgtgaatgcgaagtcttcgcccttgagcgtgtacttgttgcccttggaggaggtcatcttcttcactgcggtcggattgtccgtggcgggttgggcatgatacgtgttggtgaattccggaatgttggttccgttatcatacttcacgtcggccaacagttggccttcgccgttgtcggtgacggtgaccctcacgtgatgtttcgtagcgtcataggtgatgccgcccctgtcgccttggacttcgctgagcgtgtagtcgtacactcccgtcttcgtgtaggagatggtgtcgaacaggacgtcgccccgctggtcgttggttttcaccgttccaacctgaccgcctgtcttgtcctcgacgcatgtgaactcgtattgtccggcttgcagttggacgcctgtatggtcggggtccgcgagcgtcttgtgcgcacggaattgcacgctgaccggcttcgcctgatacgtgttcgtgaactggatggcgtcggattgcacgccgtcgcacgtcgtgttggcggtgatgcgacgggtgaacgtggtcagatcgtcggtgacggtgacggtcaggacccaagtgcggctgtcgtaggcgactcccgcattgtctcccttgcgttcccggacctgataccggtagaccccctccttggcgaaagcgttggagttgatttggagcgtctgcgtcctgttgtcggcgaacgtgatggtggagggcaccgcgttcgcgggcgcgccgtccaacgcggtgatgtccgcgacgtacctgtccctgtcggtccaagcgccgttcggacgcccgtccaataccttgaccgccttgaatgtggcgggcgtggcgagcatgagcgtgccgctcatgccgtggtcctcgttcgggtcctcgtacacggcggacgtcatctcgtccaacgcggggaacggtttcagcgtgatgacgccggcgaccatgttgccgtgcgaatcgttctcctgatcgctgtcggagtcggtcgcctcggacgcttccttcgcgtttttgacggtcgtatgctgtccgtgccaagcggtgccggttttcggtgtgaacctgagcttgaacccggagcctgccggaatggaaccgatttcgtagtggccgttcctgtcggttgtggtggtgcagggtttgccgttcacactggtgactgtcctgccgttgccgtccacgagggtgacgttcacgtcggggaggagacggtcggtgtcctcgcgtacgccgtcatggtcgaggtcgaaccatgcgacgccgttgaccttgcgttccacgacctgcgtgaccgcgtccaccttgttgtcgccgtccgcccaacggttcacgtacgagtccgccgcgctgttgcctgtaggcttgatgctcaggatgaagtcatagcgggcgttggcaggcaggcttggcgaggtgaacgcccacgccaccggcttgctgtagccgtcggggatggtcaccttgcctgtggtcgcattcaccgtggcttcggtccattgttggacctgttcgcgggttatcttcgtcgcgtccacgttgcgccacttctggtcggtggtgaagtagactttgacgccgttcatgctcgcacccgcacccgccttgacggtgagtccggtcagagcgtagtcgccgtgatagttggactggttcaagcccttgttgtaaggcatgatgtccaccgcatacggattggttttctcgtccttggagaagttacccagcatgttcctgtatcccaatgggcgttcgatgtcgttcagcagcgggtcggcgcgggtcgccaacgcggtcgcgcgtgtacgagacacgcgaaccgtgtagtcggcggtctgccccaacatggatctgggctctcccatggcgcgtttggagcgaatctccacatggttcgtgtactgctggttgttcttcgcgtcgttgtcggggtcggacgcgtcgcctatcatggtcgtgaaatgcagccgtgttttcgtcgaggagtcagccttcgcgccattcacgacgtattcgagggtggtcgtgccatccttgttcctgctgattttcggcgtgattgactggcctccggtcacggttccgcgttgctgcccatggtcatgttcggcgtaggtcccgcccacgtagctggagccgtcaacgtaggtcaatccggcgggcagggtgtccttgatgtggtagtcggtcacgtagcccccgcccgtgcttgaggcttgggtttcggcgcttgcggtgacgacccagtcaacgtagcgttgctccttgtccaaatcgtagatggttttggcggatgtcccgtcgtcgccgctctgcgcggtgcttttcccgacatgcggctgctctccgacgacgtacagggtgtcgcccctcacatttccggcggtgtcgcctccttggtaggacccgtcttcggagaacgtcgccttcacgtagttcttgccgtcaacatgcaggttggcgttaccgtatttcccgacgaaatcccgatagcgcaggcgtccaaccttggagacgaacgacacccatggggcgatgtcgtcgctgttggcgtcaagcccgttcgccttagcgagtttcgcgcgcgtccagaagtcaacctgtccggtgatttgggcggttcgtccgaccgccgtgtccttgattctgaccgggagggtcagtccggaggcaaccctttgccccaaggtgattcgcgtcgaatcccagacccgggtgtcgcagacggtcgcggcgagcaccagcccatgtttcgacgcctcggcgtaggtgtcgtaccagtcgaagtcctcgtaggacgccttggcttggctcttgtcgtcggggaagttccctccgtccggtctgacgccccagatgacgggtgcggacgagttgccgtctatcgtgtcggaaccggaccatcgcgcaccccacgtgctcgcggttattttgaccatgtaaggtttcgaggggttgttctcggcggccagcggagtcatcacggtcgggtcccatttcatgagatggtagcctatgactcgaccgtcaccgactgtgcccaaattgttttcggtgctgctcatgatgccgatggacttaccggccaacacgcgatcgctgccctgctcacgttcggggtcctgccaccgtccagtggtggaagcatcctgtcggccgcaatcggtcgaagcgcaggacgtataatacagggattgattgaactcgccgggcagcagtacggcatagtcgaaggtggtggaatcgtcgttggtgacggtctggttgccgttgtccttcgaagagggcagcgagtacccggattccgtgtccgccgtcagtgaatagtcgtacgcgctgacgattcccgtctgacctttgccataatactgcgcggccgttttgccgtcacgcgtggtggggaggatgaaaacgaagttgtccacatgcaacggtgcgacctgctgcacggttcccgtcgaatccatgtaatcggtcgaacaaacacctttgtcgccccaagtgttcctacaggggtagttcgccacatcgtatccgtcgaaggagacctcgatggtggtcccgtcatcatccgtggtcccctcatcataggagacgtcgccgtccagcacgctgttctcgttgacggcaccggctgtgatggaaaacgggaaccaccacatactgtggtcgaaggagtccaccgctctaacatgagatgaactatagccgtcgtggagcctgtcccaaagcaggggttgccatttcctctcgcccgcgtgcttcgtatgatcggcgtcgtcatcacggaacacgttcttaacgtgaagcttgtacgagattctacccctcggagcctcgatgcccttcaaccccttggaacggtccggccaacgcatcgacaccatcgccccgacgtggagctgacggcccgacaccttgccttgggtcttgttgggcgcggacgcgtcgcccgtgccgaaatcatagaccccgccccccacagtgtaggccttcagactcacgttcaggttgagtttcgcactgacggtcacatcggcgggcgtgtccacgacccatttgtgcgtgcccgtgttcgtcgggttcgaggcgtcccatgcgggccacgccttcacggtcggatggaaccggtagccgtggggcgcgcccttgacggcgaccgacaggccgatggaaccggtgccggggttcacggtcggcgactggctggtcggctccaacagacggtagcagatgtacacctgcgtgacggccccgtcgatggtttccgtggtgagtttcggctcgtagccgggcgtatggtccacccagcccatcttctccgcgtcgaacgtgaccttgtccttcgggtagggcagttcgaaccggaagccgacgcgcgtgcgccgataataatccatggtcgagtcgggggtgagcgtgtactcgtagtcgtaggtcaccgtatcgtacgagcggacgatgccgttggtctcgtccttgtcgtcgccgcgttcgttgtccttgtcgaacggcgcggtgccggtgatgcggtcggcgagcctgagcctgctcacggcggcgctgtccgtgtcgagcatgtcgtggatggtcacgtccggcgcggcctgacccgcatccgcctgcggagcggattgcgcgggcgcaccggtgccggattgttcgtccgccccggttccggcctcgtcgccggaaccggggtcgtcgccggaaccggggtcgggtttcgtcgcggcctcgtcgccgcctgtggtcgtcttcacgtcgggttcggcttggattcgcgtggacgtgcccatggtcgtatcgtccgcatacgcggcggacacggccgacgcgcctgagccgaacagcgtcgcggtcgcgagtatgagcgcgacgacctttctcagaccgggtttcatcgcttttcggttcctttcggggatgtgccgtgacaagtggagggaagtatgaatacggctgttccaatggtgcggaggatgggtcccaagtacggtttgcagaagagttcccgggacccgtcccccggttttcaccctccccggctcacgccgtccgaccatctccggtcgggtggcggtgattcgtcggggagggcgaagtctgtggttcattcatgtgaagtcaatggagggcgttccggccgtcatcggacgacgaggccggaacgcctcggggtcacttgcccgcgttcgcggccgtgtggcggccggaaccctgtgcgcggtggcgcttgcggaacacgagcagggagccgccggcgagcagcaccgccagggcgccgccggcaaggccgagcacggccgtgccggtgtaggccaacgacttggcacggtatccgttccagtcgtccgtgttggattccacggtggtgtcctcgcacagggtcctgtcgccgaccttgacctgcttgaggccggtcgtgtcggacgcgtcgccgtcgaccttcgtgtcgccggtctggttgccgtcggtggactgctggccgccgaactggtcggtgacggggcattcgacgagcggcgtgccggtgaccttgacacggtcggtgtgcttgccgccctgctcgacgcccttgagggtgccggtgatgatggtggattcgccgggcttgagcacgagggtgtcccagttgtccggatacttcaggtccgtgacgtcgccctcgcccgcgatggtcctgtcgaccatcttgaggtccttggcgagataccaggcgccctcaccggtcgaggagtccgtcttggacgtgttggtgatcttgaacgcgatctgctggctgtcgccggccatcttcaacgcgtccttcacgtcgtcgcggtcgccggcctgttcgccggaggccacgtcgtacttctcgatgtggatcgacggggtcatgtccggagtgcgggtccacacgatgttggattcgaactccttgtcgttgaagtattcggtgaaccggttttcgacgcggtcggagaccttcaggcgcttgcattggatgtacgcgcgccagccgttctcgtggctattgtccgcggacacgagggtacggtacgcttcggtcgcttcgacggtgaccacgccgttggcgtcggccgcggcgtcgaacaggtcgccgccgaacttcgaggagtcgaagccgctgccggcgagcttgtcgcccttcgcggcgatcaccttgccgtccctgtacaggtcacggctcgcgtacacggcccactggcccgtgtactggtcgtactcggtgttcagcgggtccacgatcctccactggtcgacccgcgggtaggcgcggccggccgggatgatggagctgtcgaacaggtagaggaacgtgcggtccttgtacacgctcctgccgtcgatgctttcgccgccgaccttgacggtcacgtccttggcggggttgatttccttgagcgggttggacacctcgttggtttcccgggtcaggtcgttggtgacctggatggccttgttcctcaccgtgtagccgtcctcgaccttgacgaccttgtacggcatgacgatccggtattcctggccgaggaggttctggtcgatgctcggatcggaaagcggatcatgcttggacgaggacgcgtaggcggcgaggtccgtcggctggggatcgcccttcacggtgacgcccttcttcggaatccacgtgtccacggtcttcgcgtacacgtacgcgacgccgtccttgatctggatgttgaacttgccggtcacgtcctggcccttggagtcgagtacttcgatcttggttccgtcgatggcgagatgctcgtcgtcgaaatcatcggtgatgccggccttccacacgcggtacgcgttgttggtctgcttcaggtcgagggtgacgacgtagttgccggtgtcgcccagcagcatggtcttcccgtcgatgctgacggatgggtcgccctgctccttggactggttgtccttcttggagggatcatgcttcgggggtaggttgtcgacgatgttggacggggtgatcgaattgttcagggtgagcatccactggttgtccaccctgcggtcggtcggcgcgtccttcgcgacggtgccttcgaaacggacctggacctgcgggtgggagccggcccgccagtgttcggccacgtacttgtcggagtacgtgatggtgaactggtggttggcgttgtcccaggcgacggtgtagtcgccttcgacgcccatctgcggatcactggtggtcagctggtcgccggtggcgaggtcggtgacctccagggtctgctggtcgggttcgaggtaccggtcgtacgtgtcggtgtcgcggatggacacgatgcggtacgcgaggtccgacgggatttgaggacgggtggtgagcctgtattcgaccttctggcccggatacacgaccttgtcgttcgcgtcgttgttcgcgccgccctggctgccttcggcgacgaccttcttgacgaccggcggaacgtagccgcagatgtacggctcgttggtcggctgggactcgttgttgaccttctcggaacccttgttggtcagtttcgacccgtctggattctcgcagaacgtgagctcgtcgcccgcgtgcttcccgaagtccttgcggacctgggccgcgcccttgccgttcgcgaagttcacgacgcccggcaggagcaggctgatctgcttcggattcttcaatccggtctgcgcggcacggtattccggcttcgcggtcgcggtgaccttggtgcccgccacggtgatgtcgaactggtcggtcacgtcacggcccttgttcgcgatgtccgcgacggaggacgccgcgtcggtcgtggcgtccgcctcgtacacgcggatctgcgactggtcggacgcgaggtcccagatgtagtcggcgttcgcgtaatcatcggtcagtttgatgtcggtgaccttgacgaggtcggacgcgatgacgccgttgacgacgctggcgacctggtcgccgtcgaggaacttcaacgtgtcggcgccggtcttgttcgacccggtcggatcgaccgcggcggcccacttgccgtcctcgccgagacggatccagctcttgtccgggttcgggctccactccttgacgggcggctcgttgccgggcacggtctgctggttccacttctcccaatcaccgttggtgagctggaccttctggccggccttgagcacgtccttgaggaacgcgcccttgatggtcatgcggaccttgcggtcggcggcctggttgtaggtcgtgtcgagcagctcctgcttcgcgctgacccacaccctgtcgtcctgcttgtgcacgtcgaacaggttcttcgcgtccttgccgtcgatggtgacggtcacggtcgcggagtcgagatcaatgttcctggcgctcttggagaaatcatcgccaagctcgtaggagctcatcttcctggcgaggttcctgggcagcaggccgttgacggtcacgccgaaatcgtcctgctggacgaacgtgtgcgtgtccgcgttgacgttgttggcccacgccgagtcctcggcgttcgcggcctggccctggtcggcgctccataccttgtcgggcttcggattgcgcacccagaccggcggctcgttggtcggccgggattcgttgttccaggtttcggtggccttgttggtcagtttcttctggtcggccgcggcctgggcgttcggaacctgcctgacgatgccgccgatgtacagtttgaccttgcggtcggcggtgccgaacgcggtcttcgtgaggaacgactgcttcgcggtcgcggtggtcgtgtgcttcgccgtgtcgatcgtgatgtcgaactggtcggtcacgtccttgccgtccacgtacaccctgacctggtccttgtggttccagtcgatccactgggccgacgcggtccagtcgtcggtgatcgaataggaggtgaacgggttgagcaggtgcgcggggatgcgtccgttgacgacggcgccgatcgcgtcgccggtcacgaacgtgcggttgtcgctgcccttgtcgttcgtatgttccggatcctcggcgttcaacgcgccgttggagtccaatacccacaccttgtcgggcttcggggtgaccttgccgacctgttcgctgttgccggtctggcagtggctcttgtccgtgctgccgtattcgtcgccggtccagcaggcctggctgtcgtccggaatggtgtagtccgaaccggtcggggtcgcggactggggcacgttcagcgtgtactgtccggacgcgggattcaacacgtgcgccttgacgatgcgcttgcccggctggctgtcatcgaccgtgatgtcggccttgacggcgttgccgtcctggtcggtcacggtgaccttcgaaacgtcgtccctgtcggtgccgccgatcaggaccttctgcgcggtcacgtcgatcgtgtcgtacagccagaaatgctcgctcgcgttcgactgcgcggtgatgtgcgccgtgtacaaggaaccggacgcgatctgctgcgcgtcggaagtgacctgctggccggccgcgttggtgagcttcttcgacggcggggtcggtaccggcttccaggattccctcgcgtcggccgagcccgcatggcctgcgtcggccttcatcttgccctgcttcgggacgttcacgtcgtaatagtaggagccggcgggccaggatttccatgtcttgtccacgtccctgaaaccgaacgacacgttttgggtcgtgttgttgtcctgcgtgaactgtttggacgcggtgcgggtcgtgccgtccagtccggtccaatgcagggtgatggtgcccgtcacgttctcgctgatcgaactgttgccacggctcgtggtgatcgcgtcggacacgtcgccggtcgcgccggcctgggtgaacgtgccgccggcctgcgtgctgacggtcaggtcgtagttcggcggtgcgggctggtacttgtcgagcacgatcaccacgatcgacggcttcgaggaagcccccacattacgacgcatgatcgcatccacgctgttcgacggatcatccgagaaaccatcagatgtgcggtagctctgagtacccgcatagttatatgtgtttggcgcaacgtaggtgttccagttgtcataccagccgccgggtaaagagggcgaatagtaaccggtgccgtcgtagatgaagctgcggcctgagatgtagggcaccgcgccgacggcgaccactcggcagtcgccatcgccctcgccgggatgtcgctgccggaaaccggtctcgcattccgtgcgggcctggtccaatgcggcctgcgccttcgtgacgccgttgccctgcaacgcgacgccggcattgttcatggcggcgcgcaccgaatcaagactcgtggccggaccccatgcgcccgatgcgtcgtccttgtattgccagaactgcaacacgtccatgtttccgcccgcgccgggctggttgccgccgccaccgcccgcgaacgcggtcgatgcgacgacgccgccggcaccaagcgtggcgaccgcagccaccgccgcgacgccggccttcatcatcttgccaaagttcatgtaaatgaacctccgttaaccttgtctgtccatcccctcccctcaatcgttccggtcatggccccgccgccttttttcaaggggtggcggggcttccgaccgcaggaataacgggaggtagccgccggttggcccggcagccaccaacaagcctcacagacgacacgccgaaccacggagcatggcgtctacaaaaatccggaagtatttcccggcaacacggatacacgggaatgcggggaaatgggtttcctttgcgaaattcatggaaaaggcccgtaccggtttcccgatacgagccataatcagccattcatcgatcagtgatggtagtagccatcatccttgccggtgcagctgttgccgcagccgtaagagccgttgaggttcggcttcggggcggagccgccggccgggccggagccggacgtggagccggagccggtgccgcccgatgtggcgccacggtatgtgttggagccggaagcggagcctcccgtgcgcctgtacgcgccgccggagtaggaggagccgccgttgtaggcggattgggcctgcgcccgagcctgggcggccgctgcggcggcttgcgcatccgcgtccgtctttgcctggacgctcgcgttcacgccattgatggcatcctccaccgtcttgcgcgccccgtcgatcttcgccggatcgttcccgtccttcagcccgttcgccgcgtcgatggcgttcgacaatgcgtcgcgggtggcgttgtccgcgaccttgccgtccgaatccgcgagcagcttcgacgcctcgtccagcttcgccgtcagattcgttttcgcggtttccagcctcttcgcggccttggattcggtgacggccctcaccgccttcgacaggctcttctcgtgggtctcgtaccagtcggcctgttcggtgagcttcacggtggcggcatccagtccttgcgcgtcttcggccacgcagccctcgtattcgggcgccatggccttaagctccttgcccaaggattcgacggtcttcgagtccttgacctgttcggccctgacggcggcggcatcggcggcatcgccgttgagcagcgcgttgtattcgttggcattgctgcgcacggcgtcggcggcggcggcgcacgcctccttggcctcggcgagcttcgcgccgctgtaagcgttccagccgatgatgccgaccgcaaacagcagcaccgcgcagacggccgcgatcaggggcggcagccacttcggacgtttccttccatccttgcctggccctgtgatgttctcggcgggtgtttcgaagggttcgatggcgctggtggtcttgccgaccccgcccttgaggttgacgaaggccaccgttttcgtgttcgtggtcattgggattgttcctttcatctgtatcggattgtcttcagaagagggtgtcctgcaagggcggggtgtgtgtggcggcggccggggccttcgccttgccggtcgagcgtgtggtggcgcgccatcgttgctggcgtgcgttgcgctgctcggtcttgcggcgtttgcattcgcgttcgcgtgccgccgccacgatctctgggttctcgcggatgtaccgggcgagccgccgttcggcggtcgggtcgtcggggtcgaaccggaatccggcctcctgcgcggtcttcagcacctggcgtcgggcgcgcaggggcagtccgccgtagatgccgtactggtcccggaccatgatgccgaacgcgaggcattcggccctgaccgggcaggcctcgcagatccgcaccgccgcacggcgcagatcgtattgggttcgctggttgggcaggtcgtcgggcccccacatgcggcccgaccacgagccggggaaatccgcgcactctcccttcaggaacattgttctccttgttcataggttcacagcttatttcaggcccaggtacgtttcgagggcagcatcgaccacttcctgaatgcgcatgtcatgctcggcggcccaggtcttgagcctgcgtcgggtcgaggcgcgcaggctcacgctggtcttcgcccagccctccgcgtcgttcggtttcacggtcctccggtttttcggtatttcggtttccaccgattccggtcttccggtatccgccggttccgtccggtcgctgttgagcagcgcggtcaggtcgcgcggacggggcgtcaggttcatgttcctcacaggtcctcctccttgtccttgagctgtcgcatggtctgcttgagttcggcggccaggtcgcggtactcgtgcaggcgggacccgcgggggcgagtggatttcgcgttgaggatgtcctggcgcttcgggatcagcgcctcgaagcacgcgatgcccgcgtcgtccatccatgccagcgcgtcgcgcagggcggtcgtgttggcctcggtgcggcacaggaggatcgcggcggggacgccgcgccggtcgcacaggtccttcaccccggcggcctggtcgaggtcgatgcggctggggctcgacgggatgaccacgaggtcggcgttgttcaccgattcgtccaatgcgcggccgtatggggcggagtcgatcagcacccagtcgacggggtcgtcgagacggtcgttgatcccgtgcaggtgcgcgatgtcggccggcgcggcggacatcacgtcgaacggcagcgggtcgtccagctcggcggccctgtaccaccagtccttcgcgtcgccctgcacgtccgcgtcggcgacgagcacatgctgctcgccccgggactggtccacgagggcgcaggccaggaacacggccgatgtggtcttcatgctgccgcccttgccggtcgccaacgcgatcaccatcggctcgcggttcttcttgtcgttcatcggtttctccttatttcggtatgtcggtatccggtttttcggcattccggttagttggtttttcggtattgcggtttgtgccgcgtcccacgcggatcgcgacgggaaacggtcagaagaggctgccctggaccaggcccttcggcacgggttcggtcggaagggacagcggctcgtcgtgcgtgtattcgcggcgcgagcgttggcggcgtttggtccgtcgccagtagtcgcggccatcacggcgcatgcgttcggcccagtccggatgttcggccagccagtcacggacccgactccgtgggatccggtgcaggccgccgtcggcgatgtggaggtcgcgggcgatcagtcgggcgagggtccagcggctcgcatagtcgagcccgccgtacacggccttgtccttccaaccgttgacgagaacgcggctgatgcagtcgaggcgcatggggcacgcggcacacagcacgcggcccttgccgcgcatccgttcgtcgaccaggtcccggccatcgtcgtcggtcgtcgtgttccacatgcgatccgccatggccgggtcgaccgcggcgattctcgcgcaggccggcatcatgtcccgcccgttcatggccgccgtccttgcgtcatcggcgtcttgcgggcctggaggcgtcctatggcggtttcgccgggattgcgggaggcccatgcccgggcgtattggatcagcaggccgacggccttgggatggccgaggcgcttgttgcgccagtagacggcgtgcagctgccagatcaggtccgcatgcccgtcgagctgcgggttggcgaggaggaattcgctgaagcccgcctcggaacagtcgatgcgcgtggtcatgccgtcgcctcccctccggccgtcgcgtcctggccgtccaattcggccagcgtctccacggcccagtcgggcagccatggcgcagcatccggttccggcacggccgccggaaccgtctgcgcgtgtgcgtcgccgtctgtgcggccggctgcgaggatcatgtcgtcgttgagttcgtcccagtgtctggcgagggcccggccggtgcggatgcgtttgggccaccaatcgccgttcgtggcgaagccgatcgcgtcgaccatcatgagggtgggccattgcgctccctggtcgacgagcctgcggtacaggccgatgatggccttgcggtcggctttggtcggtgagggcgtggccaggccgagcatcgagcgctgcgcaccgagcgaggcgaggacccgtccggccgcttcggcgatctcggtgtcgtcctcgtcgagttgttcggttttatttttttcggcggcggtcgccccgcttgcggggagatgccccgtaggggcagaggggaaggagggcttactcggagggtttacctggagggttttattcttatatagcagccctgcggcatttgcagtgctgggggtgcagctctcgcagtgctggaggtgcgagatttgcagtgccggttccgggtcgttttccagccctgcgagatttgcagtgctgggaatcggcttcgttccagcgttttccggagtcacgtccttggattcgccgttttccatgatggtggaggcggcggggtccacggtattgcccatggtcttcgggtcgtgttccgccgtgtgcgtctccttgatccattcgagggtcgacgggtcggattcgaccgcgaggtcccacacgatctggcagtactggggcagacggttcctgccgcccttgccgaggcgcgcgtaccgttggtcgccgcggcggatgaagccgcgctcctggagagtcttcaacgcggtgcgcacggtccgttccgagagttcggtgacgttgacgatggtcgcgatcttcggataggctgcggtgccgtcgtcgtccgcgcggtccgcgaggtagacgagcacggccttcgcgctggcgttgcccacatggcatttgaaggcccatgacagtgcgatgttgctcacggccgctcctcctcacgctgctgggcggcacggcgttcggtgtccagtctggcggtctgctcgtcgccgagacgtgccgctcggcacagggccaataccatcagccatgagaacgcgacgaacacgatcaatgcgattgcgagccagttcacgcgagtctcccttccatggacgggtgcgccatcatcgacgccaggcgacgggaatcggccggatcatcacggcgggcggacgccaccgcggccggggccgtccaaaccggcgcctggaaatcccggttacactcgggaaacacagagcaagacatgcggaatgctttagtaaagtcgttcatgtgtgatcactactccaagacaatgcattgggcggccacggaccgggatccggcaagatacgggatccgcggccgctcggaatattggttgcaccgcccgtccccgacgttccagcatcgggaacgggcattttttatcgattgcagagaaagagagaattccaaatgagatcagaccatcacaccacctcccccgccgtcgacgggccacgcgccgccgcaacggatggcgaggcaaaggcaatcaagagcttgctcgtcagggacatcaaaggctgcgatcaaagcgtcccagcagtcgtcagacacgatgatggaacgatcaggcctacgtacataggcgtatggggacaggaccgtctgataggcgcggccctcatacagccagccctttgcgtagccgagacgctcatataccacaccgggacgagcggggtccatgccgcacagatacgagaggctttcgccgagcatgcagccctcatcgaagggatcgcggtcgtcaggaagcatcggcgcgaaggcatcggattgcagatcaaggcgttccgcgactcctgggcggcagaccacggcgctgagctgatactcagcatccccaccaatgagggcgcgcgcctgctcaacgagaaagccggatacacggtcgtaccgcccgacggatatctcaccatcaaggtatttgacgctcagggacagcctcttcacattccctacgccgaccagtgaacccaggacagaggcactagcatgtgggcgtacaagctcgtagggcaacgcacacagcacttcgagattggcgttctcaccgcctcctgaagttccgaagaccataccgtcgatgaatgttcccgacgggtcgcgggagaaaacaagtcttccggcctcgtcgctcataccaccggcaccggaatccatggccagtacccctacaccgtcaatcgccatcagaccaacacctcctttatcgattcagagaaagagaaaaccaaatgaaatcaacccctcgcactatttcccccgacgagcccgaagtacgtccggcgagaaaccacgccgaggcagaggaaatcggaagtctcctgctcgaagaaatcgcgcatccaggattcattcctggaccagagttcgtctggcagggtcaaggctttctcaggccgacgctcataggcgcatggtcccagaaccgcttggtaggtggtgcctcgctcagtccatacatggaacacaccaaggcctttttggggattagtcgagcagacgcagcgcaggcggtcgcacggctgatagctgaaactgacggcattgccgtcagacccgaccatcggcgtgaaggcgtcggacgaaagatcaagttgttctgcgactccttcgcggcacagcaccacgctgcgatcatggtctccgtcaccaccaacgaagcagcggcaggcctcaaccacgaagcgggccacatcgtctttgaacggtgcgacggcctcgtcatcaaatacgtagacacggtcggcgagccactcatatggcttcatgacctggatgggacgatccccgaagcggcatggtccgtctccgtactcggcaaaacgtatggaccgaccatagtcgtcggtgagcaacgggccatacggcgtggaaacgccgacaaggacatccagtgggttttcgccgttgacgcggcgggccacgctgtcgcatgacacttcgttgctcatgacgccctcccctcggtcaacagcaggcccgccaccatccgttcgcgggcggagagctgtgcatcgacctcccggaaggcatgcgtgtaggcatgcgtggggcggagccaggtgtcggccaggccgcgggtctcgccacggcgcagggcgcgcacggcgcaggccgggcagagctccaaaatctccgtgtcgcccgggacgcagtagttgcgccagccgttacgggcgaaataagcgtcgcgagcggccgaatcgtagtcgtcccagaacgcgctccagaccactgtgtggcagccatcgcacaccgtgacgcaatcccaccggctgtccggccattcggactgttcgtagattccaccagccatcacgcaacctcctcacgatcggcatcagacgaaatgccaagaacaaaatcagacgacaagccgaacttgtcatggaagaacagcaaatcccgctgctgccagggagtttcaccattcaactttttacaaacagtcgcagccgatgaccccatggaggcggcaagtttgcgataggaaatcccctgtgcttttagccattccttcatgtcggatgttcctttcgcgtcctgttgtttcttcacaactaacaatatagcgtttcctttgacgaaacgcaaatcgatggatacacttgttgttatctattaagaaacacgcataacagaggactaacaatgaccacatcagccccagcaacagccaagaaaaacgtcgacactgaagtgcaatatgcagagtctgtaatttcctggaacgtcaaaatgcttttgactgcacaaaacaaatcacagagtgctcttgccgcttttctaggcatacagcggccgaccatgactaacaaaatgaaggggcgaattgcatggtcagtggcggatttggtcaaatctgccgattttctcggaaccaccgccgaggcactcatggatgattcattgatgtcgcaattaaaaactggatataccgaatcgaccaagcctaagtatggagtgtttgccgagaaaccaggtgctttggtaggtgctggctcccccaggttccttgtcagtcccttcaaccccgacgctccggtcgagggcggaatctcgggtgcgactaaaggtgccttggctggtttcgtgccatccggggtcctgtccggttcgggatcctcgtccatgctctcaaagcatgatgagattggggttcccggccggtctcaagcccatgagacacttggagccatgactaccatcatcatgcgcacctctgagggcgatatcaccatcgacctgttcgacgacaaggccccgaacaccgtggccaacttcctgggcctcgccaccggcgagaaggaatgggccgacccgtacaccggtcagccttcccacggcaagttctacaacggtctgaccttccaccgcatcatcaagcagttcatgatccaaggcggctgcccgctcggcactggcaccggtggccctggttatgagttcgacgatgagatcgatccgagcctgaagttcgacaagccgtatctgctggccatggccaacgctggtctgcgccgcggtatggacggcaaggtgcacggcaccaacggctcccagttcttcatcaccaccgtgccgaccccgtggttggatggccaccacactatcttcggtgaagttgctgatgacgcttccaagaaggttgtcgacaagctcgaggccgtcgaaaccgatccgatggatcgcccgctcgagccggccgtgatcctctccgtggacgtggctgagtaagacccaccacaaccgataacaaagccctctgatcgattccaatcagagggcttactcgttcttggctcccctctgaaggggagccagagtacggtacggactacttcatcttgcgcatacgcggctcggcggactccttggcaccggtcagacggtacacgtcaaacacgccgtcgatcttgcgcacggcggccagcaacgtgttgagatgctgcggatcggccatttcgaagctgaactggctggtggccacacggtcggaacccgtggcgatcgttccggagatgatattcacgccatgatcggacagcacgcgtgtcacgtcggacaacaggttgcgacgatccaaggcctcgacctgaatcttgaccatgaacagacccttggtactggtccattcgacctcgaccacacgctcgggctgcttgttcttcaggtcgatcatgttctggcagtcggtgcggtgcacggacacaccctgattacgggtgatgaagccgatgatctgatctcccggcaccggcatgcagcaacgggccaatttgacccacacgtcgcccacgcccttgacggacactccggtagagctgctggaagttttgcgctcgatgggcttgagcggcagagcctcctgctcgacctcctcatcgacctcatcggccccggcatccttgaccagatgcgagatgacgttctgcgtggagatctgcccatcaccgatggcggcgaacacagcatcggcgttcgggaagttgagatcgtcggccacaccgatcagtgcctcggtggtcagcagcgcattgaccggcaggttacgcttgcgcatagcgcgggtcagttcgtcgcggccttcctcaatggcctcggtacgacgttccttcgagaaccactggcggatcttgtttcgtgccttcgggctcttgacgaagctcagccagtcgcgcgaaggaccggcagtatcggacttggaagtcaggatctccacggtgtcgccgttgtcgagcgtggtgtcgagcggcaccaaacgcccgttgacgcgcgcgcccatcgtacggtggcccacttcggtatgcacggcataggcgaaatcgaccggtgtggcatgggccggcaaggagacgatcttgcccttcggcgtgaagacatagacttcggacgagccgaggtcttccttcagggaaccgaggaattcgttggaatctggggtttccgaagtccaatcggcgagctgctgaatccacttgaggttatcggcctcggacagctcctgattgttcacatcgcgcttgcggtcggacttgtctggcgagctcagggcacgaccggcctggccgttctccttgtacttccagtgcgcggcgataccgaattcggcacgacggtgcatgtcccacgtacggatctggatttcgaccggcttaccgccggggccgaccaccgtggtgtgcaacgactggtacatgttgagcttcggcatggcgatgtaatccttgaaccggccgggaaccggattccaccgcgcatgcacggcaccaagcgccgcatagcagtcctgaatggtatcgacgatgatacgtacacctaccagatcgtagatgttcgcgaaatcatggccacgcacgatcatcttctggtagatggagaagtagtccttcgggcgtccggtgacgtatgccttgatgttctgctcgtccagatcctcgttgatctcggccagaatctgcttcaaatacacatcgcgttgaccggcccgacgagccaccaacaccacgatctcgttgtagatcttcgggtagagcaccttgaagctcagttcctcgagctccgtcttgatggcgttcatacccagacggttggccagcggcgcatacacgtcgagggtttcgcgcgccttcctctgggcggaggtggtcttcacgtatcgccaagtgcgggcgttgtgcacacggtcggccagtttgaccaccagagtgcgcacgtcgcggctcatggccaccacaagcttgcgaatggtctcagcctgtgcggaatcacccacttcgagctggctcagcttggtcacaccatcgaccagtccggccacggtatcaccgaattcggcacggcactgatccaacgtgtagtcggtgtcttccacggtgtcatgcagcaaaccggccgccaccacgatcgggcccatgcccagatcagccagaatctgggagacggccaatgggtggatgatgtacggctcgccggacttgcggcgctgaacggaatgctggataacggcacgctgataggcgcgatcgaggatggacaaatcctctccagggtgatgagccttgcacacctgcttgattggttcaagcggattgagcggatcagcgctgatctcgcatcccagcttgcgggcggcatactgctcgccatcgatctccgacatgccagtcacctccctcatatgacactcattgtagccgtgtatcggggttgactgcgtgttggcaatcgcatccagaccccgcctacggttaaatcaggacgccactcccgtggatccgaatccccgttccgccctgtctgagccgggcaagatctcggcggggatgaatcgggcttcgacatagcgctggatgaccatctgggcgatgcggtcgcccgggtggaagacggcggtatgctccgggtcgagattgatcagcggcactttgatctcgccacgatatccggcatcgacggtgccgggcgcgttgagcacggtgacgccttgcttggcggcaaggccggagcgcggatggaccagtgccacatatcctgcgggcagggctatagccacaccggtgggaaccagtgcacgctcaaacggtttcagggtcacgtcaacggtggtgatcaggtcggcgccggcgtcgcccgcatgggcgtaatgcagccgggccgggtgctcggggtcaaggcttttgaccaggacctcggtggactcaggctcgttgtaggtctcgtcaaacgccatcaggcggcgcactcctcacacaccggctggccatcctcgtcggtgtaggcgagctggctgcggtgcttgaccaggaagcactgggagcagatgaactcgtcaccctgcatggggataacggtcaccgaggagtcctcgttgctcagatcggcacccggcagttcgtaatcctcggcaatggcgttctcatcatcgtcgatgtcgctcgaggtattctgcgcggactttcccagagcctgcagcgattcctcgtcctcgtccttgttacggggggaatcataatcctgagccattatggtcctttcgtcgtctaccgttggcgttcacgcggtttcgccgcgttgtactcgcccataggatacatgatttgaaatacttgtaaagttcgacacgtggggcatactgggaataagtaatgtctttgcgacggaaagtggtgtgcatatgcctaaggattggctcgagaaggcccgtttcgagcgcgtaagcgaaacgggggacctcgtattctccttgggaggccatcagttcgccgtcagcttggacgacacgctcgaacgggcgattctcgaggccaagcaggttcgcagcgaacagcagcagccggaacagccccatgagcagtccacacttcccatctcgcagatccagtcgctgattcgtgcgggcgccgacccgtcccgcgtggcggaacgctacggactgagcacaacgctggtacggcgtttctccgccgcggtggaaaccgaaaaacagtatgcgatcgaacagttcctgacggtgcccgctccgaaggacagcaaggtgcgcaccatcaatgagctggtcgaacgcactttggcggcggcgtccatcggcatggagtcggtgacctggaaatccacccgccgtgggctggaaccatggcatatcgtggcgatttttacttccgccggacgtgagatccacgccgaatgggcctggaacatgcacgacaattccgtggtctgcctgaacaatgccgcacgcaagctgctcggcgaacagaatccgaggaccgagaacgcaggcggcgcaaaggcttcgccggaacctgcgctgccgggcgattccgtccgttcggcgcgtatcgagcgtgccgtgtctgcatgggccgcgccaaagccgtctgctccgcagacccatccggcgtcctcgaatccggtgacctccaccggctcgatgcctccgatcgatctctccgcctccgggtccatgccgccggtcaagctttccgcaccggtttcgaccggtgccgcgagtacgcagacgccgcccgatgacggccggattccggctgcccaatccgatgccccggtccatgacgaagtcatctccgattccggtgcggcgccagtggaaaccggcaaagccgcaaaaaaggaacagaccgcagcacccgccaaagcagctccgacggaacccgctgcgaagccgtccagaaggaagtcgggacgctcggcggtgcccagctgggatgagattctgttcggcgactgattattcgctatatctggcatagccggatatagccgcctgacgatacgactcttgtccccggaatcgtatgactatgccatgtcgatatcggtcagacgatatcggtcaggcgacgtcaatcaaacagggaatatccatctccatcatcgtctgcgacccatgcacgctaggcaaatgggtggccttatccccctgagtacgcgaatccacgaatgtggccgcgccggcagcctgtaccatcacgtcgccgaggatcggccgaatacgttccgatacagggccgaacagcccatcggcacatgcctgttccttggtacgcaccaacgccgcgtcccccaagcggtcacgccagcgatcggctatggcgtccggtgattcgccgggttcggcgtacagcatcagagagcgcggctctccccccaccagttccacgccatggatcagcgaaggctccgtcgcgatgtcgagccgctgatccatgtcggtctgcaccatgccatggtcggcgatgatgacgatcaaggtgccggctgacgcgctacgtttcaataatgcaagctgtgcgtcgatgtgttcgaaagccgccacccaatgctcggaatcccagccgtaattgtgacccaccttgtccgcgtcacggatatacagataggtcaggccgggcctcctggcggcgcgtgctgcggcgagcacgcgatcacgcggggtgacattggcctgataatcagtgccgcgcaaggccgcctcggtcagtggagagccggcaaatttgggcagtccagaactggtgacgcgcacctcctgacggcgaagcttctcgaacacggtctgttcacgttgcaaatcatgaggatcgaccatgggaggggtggtgattcttggattgacgggtttgggcaccagtgcatccttgaattggatgagttggatgagcttgtggttgttcggctccagctgcgtgtatccggccataccggtcaatcccgggcaggtgccggtgccgaacgtggccatggcggccacggtggtgctgggcgcgcaggtcgcgatgggacgctggttggcgctctcgttcatcagcgagcgcaggtagggtgcatggccgaggcgcatggcgagattccagtagccaagtccgtccacgagcaccacgatggccgatgtggcgtcaggcagcccgagggcttttttgcaggcttggggatcggtgtggaccttggtcgagatcggatgaccaatggcggcggaaagagccggcaatacggcggaaaggtgcagcgctcccccacggcccgcagctgtgtccccataagtcactgtgggcaccaaccgcagcaattcgtccatatccggcgtctcaacactcataattgctcattatagagctcacagaaaaccgtgccccattgcaaaagtgtgagccaaacgcacaatatcaatcaatcgcacataagtcattgtgctgaagttccgccattcttcgtcgtcttatgtgcgattggactggccgagcactcacacttttcctattgagaaccattcgctgcgcgccgtttcgcgacctgacgctaatatagggcgagttcgaaagggagtttcatggcatcacaccgcaaaccgtccgcgcaaacctatgatccgcgtacggtcaaggagcatatcgtcgagacgccgctgaacgaggagatgagcaagtccttcctcgaatatgcgtattcggtgatctacgcgcgagccctgcccgatgcgcgcgacggcctgaagccggtgcagcgccgcatcgtctaccagatgggcgagatgaacctgacccccgaccgcccgtacatgaagtccgcccgcgtggtgggcgaggtaatgggcaagctccacccgcacggtgattccgcgatctacgaggccatggtgcgtttggcccagccattcgcgatgcgtttgccgctggtggacggccacggtaacttcggttccttggacgacggcccggcagcctcccgttataccgaggctcgactcggcccggcagctctcggcatgaacgcggatatcgacgaagacaccgttgacttcacgccgaactacgacaacaagctcaaagagccgaccgtattgccggccgcaattccgaacctgctggtcaacggcggttcgggcatcgccgtaggcatggccaccaatctggccacgcataatctcggcgaagtggtgaatgctgcaaagttcctcatggctcacccggatgccacgcttgaacagctgatgcgctatgttccgggccccgactggcccaccggaggtacgatcatcggccgcgacggcattcgcgaggcctacgccaccggccgaggcacgctcaccacgcgcgccgccacccatatcgagcatgtcacagcccgcaagcaggccatcgtggtcaccgagctgccgtacatggtaggtccggaaaaggtgatcgagcgtatttccgacggtgtgaagaaccgcaagctggagggtatctccggcgcgttcgacctgaccgatcgtcataacggcacacgtatcgtcatcgagatcaagaccggtttcgatccgcatgcggtgctcgtccagctgttcaagcacacgccgttgcaggacaacttcgccatgaataacgtggcgttggtggacggccgtccgcacacgatgggcttgaaagagatgctgcaggtatgggttgatcaccgtcgtgtggtgattcgccgccgtagcgaataccgcaagaagaaagccctggaacgcctgcacctggtcgagggactactcctggccatgctggacatcgacgaggtgatccaggtgatccgcacttcggatgatgcggatgccgcgaagaaccgtttgatggccgtattcgatctagacgaggtccaggcccagtacattctggatctgcgtctgcgccgattgaccaagatgaaccgcatcgaacttgaggccgagcgtgacgatttgaagaagcgcatcgaggagctcacccgcattctggcctccgccgaagcgctcgaccatgtggtcaccagcgaaatggatgaggccgtcgacaagtggggatcgccgcgtcgcaccgtgctgttggacgccgatcccgacggcacgttgacgccggtcgtggcacagggttccggcacttccggaatttcgaaatccgcgctggaggctgtgaagtccgccaccaccatttcctccgccgaggccgatgtggctgccgccgccgcggccgccaagaagaccggcgaacagtccgctttgaccggagccctgaagatcgaggacgagccgtgcgtagtgatgatgagcgccacgggcctgatcgcccgtacctcgccgagcgccatggaggtgttcaactcacgttccgcgtccgacggacgtctgcacgatgatcaaatcaccacgattttccggacttccactcgcgccacctatggtctggtcacctcggccggacgcctggtgctggcacatgtggtcgatctgccggccttgccggcgtccgccacgctttctctggagggcggagtccaggccgacgacctgatcagcatgaccgaatccaccgaccccgtacgcggggaacgagtggtgaccgcaatcgccatggagcagtcggccgataacggcgaaaacggcggcgacggcgaaaccacggcggaggccaagccgctgccgtcgctggccatcggcacccgcaacggtgtggtcaagcgttggaaccgagaagctcctaccaccatggattcctggccggtcatcgacgtgaaggacggggacgaagtggtgttcgccgccgtggctgaggatgacgaccgtctggtgttcgtttcctctgattcctcgctactcaccttcgatgcgaagaacgtgcgcccgcagggccgcacggccggcggcatggccggcatcaagctcgccgagggtgctcatgtgatggccttcaatgtggtgcccgccggcaaggtggcttggacctacgaggaaggcgagaacggtctgacttcgggtgcgggcgcggtagtgctcaccgtggccggggatgaggatgctctgcccggtaccgaaaacggcgccgccaaggtgactccgctggagatgtatcccaccaagggtcgtgccaccggtggcgtgcgttcccaacgcttcctcaagggccagaacacgctgattctcgcctgggtgggcccctatccgctgcacgcatccacatccgccggctccccggtcgagcttcccaaacccgacatgcgccgcgacggttccggcgtggacctcgcatcccccatcgagtttattgcataggaatgctcacaatgaggcggggccaccgtttctggttccgcctcataacttttccaaattcaacgcagtaagtgacaacccggtttattacggccgaatcacacgccccatacgttccgcaatcaggccggcgatgacatcgtatccccgctgatttggatgaatggtgttaccgtacagtatccttcgctgattgaaactcgacgcataatcgaggaatctccagcctttgtcctggcacatccgttggtagcgttcgtttagttgctcgaccgcgtggttcaattccataagagtcctcatgttgaaacgagtcatgattggctgctcgagcgcgaattccgggacggaaagaatagtaacgtccaatctcggctgaagcgcaatggactcttctatgattcccctcatccgagctgccacgtcatccaattccatgctggcgcgagcatgttccaagtcgatgtcattagtgcctaatccgaatgtcgcatattgcgcatcaggaagcatccgacgtgcgatctgccacggtccatatgtctgatagtcgacagtgctggcaccgcaatatccgcagttgacgacgttgatgcccagtcgttcccccacttgctcgggccatggacgctgagccatgtaaccaagccccgtgtcacctcgtgtaatactgtcgccaacgcacacgagcagcggctttttatgaaaaacacacataatatgtcccttcatagggcgaggcctggatcctctccaccaaagatccagacccctgaacagtcctatctactttgccgttacccgatacccctgtccattgccgtatttgacaagttgcgcctgccatgcagccatctgttccgcgatggtgttctcaccggtgaatgccttggacatgtaatctggatagatggagccaccgtatacctggtagggcaggaactggaagtcggttttcacgttcgacgccgattcggccagcaccttgttgacctgctgtccgccgaagtaatccttcttctgatcctggtactcgctgctttccaacgtcttggtcagatcaggcacgatgccattactggtgagtatcttctccccgggaccatagccaacgtacttagcaaattcgtatgcggcctgagcatgcttggacccttttacgactgatagggatccgccaccattctcggcactcgttgtatcgtcctcggaccaacctggcaatggtgcaacgcggaatttgcctgatgcctcggaagaagattgttgcagagtaataggcatccagccgccggttgccactgaagcaattttgccgttgccgaggccacggaaccaatcatccgaccagccgattgtcttcgtgtcaatcagcttctcgtcaatcagcttctgccataaactctcatagcgtttcacgccctgatcgttcttcaaatcgatagtgatattctcgccgtcaacggtgaaaggttgaccacccgcctgccaaatcaacgacaaagcgattcccgcatcagagccagattcagcggcaatatacatgtctgggctcagcgcgtgtatcttctttgcagcctcatagtattcatcccaagtttttggagcttcagtcacaccggctttatcgaacacctctttgttgtagaacaaagccatcggaccgccaccaatcggcacaccataaatgccgttgtttatgtggacaccgctctgcgcaccttttgtgtattcggacaacatcttggaatcgaacccatattgagatagttcttccagatcaccagaaatcgcaaattggggtactgcattaaaatccagctgaacaagatcaggagcaccactacctgcttcaatggcattgctgagcgcggaatactcgtcgttgctagaacccgcattgacaatcttcacatcaatattcggatgttctttctcgaatccttgcttagccttactgacggtcggttcccaggcccatacgagtagctgctgcttctcatctaagccggctcctccattcgaagaattggggctaccgcatccggcgattccaatcatcatggcaacagcaaccgaagccgttgtaaatttaaccatattacgcatatacgcctccttgcgcccacgagaaccatcgtttggcaactgttcccgcgcttttctccatgacgaaggattcctctcactgcatgacggtttccttcgccttggttcccatcataagaggaactttcagcaaattcacttgccattacattgatttcttggctatcattcaagaattcttggcatatcagtcagaaagattcgatatgatgagttgacttctatattcggacggagtcactccaatggaacgtttgaacatggctccaaacgtactttgcgaccgataaccacaatcctttgatatctgcagaacggtcaaatcggttaatgacaggagatacttagcgcgtatgacacgtaaacgtgtcacatactcattcgggctggtccccacgatttcacggaatgccttagcgaaataaaagcgactaagacaggcaattgccgccagccggtcgatggacaaatcctcgtcaagatgttccgcaatataggaaacgacccgttctatcgcaatatgagtggcgttaccggtccgatcgatctcattgttcgcatcacagtctgtaagaatgccatcaatgagatgggccactgaggacggagccagttttgtccgtccggacataacgtcgataattcctctcatcgaattgacgatccgatctgtccgttcgcggattatagccacttcatcatttctggccagatatcggtagtaggcgttggccgttggcccatcaaaatgaacgaaataatccttgcatggcatagtcgtccagaaatcatgcggattacggcagttcataagcagtaattggcgttcatggacggtgaacagcctaccggcgactttgatattcaattcgccttccctgatgtaggcaagcatgaaattatccattgatcggtgacgaagcgaatagccaggaagatatgacagagagccggcaatcaaaggatacaggaatgtatcctttacctcattgttcggggaggccagataataagtcgattccgtggaatcaaatcctgagccgctcattctcatgaatatgagtgtatcagcgtctcatcaatcgcactggatcgttctgccgcaatgattctgacagatactgcgttttctcattatgagcgcaatggtatgcctgccatacggagtttatgcaagagtggggtacgcttcatcacttcgtcgaatccgaaacgcacgatggcactgactccgcctcgcttcagaccttcttcgcgaatgcgctcgtcagcaacgacttctctcacacctttgttatccgtcatttctgggtcgacgtatttgcgggttccatcatattcgcccacgatcatgcgaccatcttcaagccgccacagaaaatcaacacgatatgccatgccggtttgggggtcgataatggtctgctgtaattcgggaatcttgtatccgccttcgaagatggtgccacgtgtcaatgattcgccgccattttcactggtaggatcagcataatgcaacaaccgcagcgccgcagtgcaatcgcgttgcatactggcgcatatgccgatgatgtcgttaatagcaacgccccgacgcaatgccgagtcgacaatgggcagtgcatagcggaattcaagagtcagcgcgcaatccaccactgttcgtgcttcactggtcacggcaacaccatcaatatgccgtatatccgtctgctggcttttcggtatgaacaatcgccgtattcgtccgttaccggtatcacttccctgagtatgtgtggcaatggttattgtgccgtcatgcagtaaccattgatgttcgaacccgtgaagatttgcggcggtcagaccggcaaacacccagtgaccatggcggagtcccaatgtgcgcgcaatatgagcggacttctcggcagggttcagcgacttccaaaagtcaggtttcacaaacaggccggggaatacccgttcaagctcctgcgcagaagcccgtctttccaatgcgcttcgctctgctttggttctgccaaatgcacaacgacgctcctgttgcgacacttccaataatgtttccactgctttgtgatgcttcataatatcgacgatatgcaacgatgcactattccagaaacccgaacaggtaatgtggttccagcttcctttggtcccgtctggttatccgacgaagacaatatctcataccgtttttgcaatatggcagtgtcggtttttctcaaatcgctcacgcccagatgcattcgttatcgtctttccctgcaactaattcgcaattcgtgactggacgaaatccatcatcttttgttgatcgcatccgaccgaagtccaccacccggtgccgatctcgattcatttgcgatcatttcaatagagcggaacagagaggtatcgcagttttgccccgctaagctcacttcatcgaggcgaatcggatatcccaaccacgaaattccccctcatgggaaatccaaacgaggcaacaccaagatggcagtcgtactattgccccgttccagataccttatcgaggccctgatgaggctggaatcacggaattgccctactgacgacatctaagcaaggcaacggcaagagagctatcaacattctgcctcgctcactcatctcagcaaagcaattccaagaccgccatcacggggcaaccccactaaagccataccaacaagacgattccaagatcgccatcatggcattgccccgctgaagtcattccaacagggacaatcccaaaaccgctatcacgatgccaccccactaaggctttttggcgaagtgacacccagaccgccatcgcaatgtcgccccgctgagcccaccatggagagatacaatcctcgacaaaataatgcacgatgccataattcccacgacaatgcggcgtagtagaccgcatgcatccatccagtacagccgcatgccccaatgcgaccacatgatgtctcagtacaaccgcataccttgtggcacggggatgaatccggcctgatgaagaatgcgggcgaagggatgtcgggcattgagaggctcgccgttcatatcgctgaaagttacggtgccattgccgctgcgcttgagggcatatgcgagttctgtggccgccttgcgtaactgttcatcattcgtcatgccgaaatcaggggaaatctcaaaagctgactcggtagaagagacaccaccctcagtcagcccattagacgctgcaccagtttcaatcgacccagcggaaacgacaccgacatcggcagatcgctggaatgcggtcaaatgcttggctttggcggctgcatagagcaacgcaccttgcgacccaagtacgactacagctccggcacggcgtacaggcctgcctgcacttactggcacatcaggccaaccgattgccgaaccactgaggttcgcgggatcaagtacgctcacggccaccacggattggctgcgatgctccgacggatgtctcagcgcatccaccgtgtcgctttcggcgaattgcgccgcgccgaagccatgtatgaacatgccacgcaccagtcgtccatgttcctccatgcgtttcaatatcggatagacggccgaataaccacccgggatatcttccttgtcgatcagcggctgtgcgatcacgccgtagcggtccaacaatgcttcgactaatgcgagcgcacgctccgtcgactcgtcctcccccataccgggaacagccgaccataggccgcccaacgtcatatccgcagaggcacgacgaattggtgtcacgcgaccgcggcgacgcgaggtcgaagccttgcgagagccaccagttcccgcagtcagcgcacgcacaggtgcaaaactggaattgctgattctgccttgccacaccagactccacaaggcgtccttgaattgccgttcgctccactcctgcgggataatctcgccggtatctgggttgatgtccggctcggaggtctcattccagacgcgcttggcggcatctgccagctgacgggcataaaatgcgccgcccgaagtcaacgccgtcattatcgattcaggcatggtctcgctatcgccatcagccgatgcatccggcttggagacgaaccgtccggaggatgcggcacctgccgaaagttccgaagcctcggtatcgccaagcagtaccgaatccgcgggatggaaggcgatctctccgggctccaaggcaccggtgccgccggctttggaccccacccacaccacatcgccaccggtaagaagttcgtccagcatcgacggttgatagtcatgcacgcgagcggggaatatcgcggtctcccagagaccagacggcagcgcgacaccctccagctgctcgatgacacgcatgagcccatccgcaccctcgtatcgctcaccgccgaccggaccgatgccctgcctgtcgataaggaacatttggaaggcttccggttccactggccgcactgccttgcgtgccttgtccaatgaccgcgaacgaatacgacggaacacatccttatgaagccattgctgttcgctcccgccggcgggagccgtcgacggagtcgactgagggtggcccttctccggatatggaccaccctcagtccgcttcgcgtccagctcccgccagcgggagcatgaagtggagtccacgaaatgaccttggagaaggtcccctttggcggccaactcgtccaatgcatgtacgacgcttgcggcgtcaagatgcaggtaggcgatgatctgatctgcggtgaacggaccatgggttttcgcgtaacgggccactcgcccggtcacgtcatcggcggcaagttcgttccagaaagtccgcttctccagctcctgctcaacttctctgatcacatcaggattgagcaccttggccatgtcggtggtgccgagcagtcgctcaagcatctgcgagtccagggacagcagttgtgtgctgcgctcggcctgaggctgatcgtattggtacatcaccgtgcccacgaagccgaagaggatattctcggtgaacggcgaaggcgactcggtttccacgtccttcaaggcgatggttccggagtgcaatccggtcatcacctcgttcagtgcgggcatgtcgtagacgtcctgcaggcattcgcgcgcggtctccagaagcagcggaaagtttttgaccgtgcgtgcggattgcaggagttgtgcgccacgaagacgctgttgccagagcggcacacgacgaccaggatcggagcggggcatgaacagtgagcgtgcggcgcattcgcggaatctcgaggtgaacaacacggattcgcccacttggcgttccacgtccgccctgagatcttcagggtcgaacaggaataggtcacacgcgagaatgtgtccgtcgccttccggcaactgcagtacgatgccgtcatcagcggcatatacctgaccgtcaaatccatagcgttggctgagtctgcgactgatggccatggaccagggttcgtggacgcggcggccgaacgggcttaagagcacaatgcgccagccaccatcttcatctcgggtacgttccacgataagggtccgatcactggggaccgcaccggtggcggcccgttgttcggaaagtagacgggcgaggttggcgatggcgttagagtcgagaccgtcttggtggaggcgggtgaggattgcgtgggtgaaggtcggagtgctcctcccctcagtccgctccgcggacagctcccctcggagagggaagccagaatagtcaccttgctccatcaccaatccgtcggcgatttcacgggtgaagcgggctatggcgcggctgaaaccgtagtcacgtccagctccctcaccatgccagaatggcagtcgggcggttcgtccgggcgccggggtgacgaccacacggtcgcgcgtaatgtcctgaatctgccatgtggaggtgccgagtgtaatcacatcgccgacacgcgattcatagaccatctcctcatcgagttcgcccacacgacgctgccctttgccggcatccacctcaggcaataccacggtgtacaggcctcgatcaggaatcgtaccgcctgaagtgaccgccactttctgcgagccgggacgtgccgagataagaccgttatcccgattccacaccagtcgcggccggaaggcggagaactcctcggtgttgtattcgccggacatcatgccgatcaccgcgtcgaacatgtcacgcggcaaatcggcaaacggtgccgaccggcgcacggtgacataccagtcgtccgctttgaggtcatgcatcacggcggcggccacggtctgctgggcaagtacatcaagcggattcttcaatacggcaagcggctcgatatcgccggcgatcatggactccagactggcggcgccggtaacgatctgctggcgggtcaacggatagaacaacgcatgcgagacaccacccacctgatggtcggcacggcccacccgctgcaaacccgaggaaacagacagaggcgtgtcaatctgaatcaccagatcgaccgaacccatatcaatgcccagttccaagctcgaggtggccaccacacaacgcaattcgccgcgtttgagccgttcctcgatcatctttcgtcgctctttggagaccgaaccatggtgggccatggcgatgacgtcatcgccttcatgcgagccgaccagcatggtggtggaaccgaccaccgcatcataatgcgaggcgaaaccctcacggccttcgggcgaccccatgtcccgcaccaagtcgggatcgacttcatgccgggtttgtgcataaaggtcattgagccgcgcagtgagcttctcggccacgccacgcgaattgacgaacaccaacgtggtgcgatgtgccagaatctcatcaagcacgctgcgttccacaaccggccagatggagccagaagtccggtctccggccgcaccgaccagcacagcggagtcaaaggcgccgcctgtcgtacgctcgcccgacaacagggcgccatctccaccagcaccggcttcgccgccgaccagcacgccattcccacccgcagacaaaccggaatcgcccgtttgcacgattcccttgcgctccgccaaccgttgcatggccggcgtaacaccgctgatatgcggagtcggacgttcggagtccacgccgccgacgcgctgcttggcgttcacagattgcagatcgcgcatgttttccagtggttcgaccatacgcagatccatcgcgggcctgccgccgggattcacgatggtaaccggtctgccgcctgtcagaaaacgtgcggcttcttcgggcggattgaccgtggcggacagcccgatacgctgcagaagaggttcattaccggaatcatccgaaaccttggattcgccgtcattgcggtccatcgcgtcgcgtctgcgcgattcggcgaccaggttttccaaccgttcaaggctcaatgccagatgcgaaccacgcttggtaccggccaccgcatgaatctcatcgacgattaccgtgtcgacggtgccgagaatccgcccggccttggaagtgagcagcagatagagcgattcgggcgtggtgacaaggatgtccggcggatgggaggcgatgcgccgacgctcctgagcagtggtgtcgccggaccggttggcaaccgtgattttcggcgcgggcagcccctgcgcctcacattgcgcagcgataccctccaacggctgttcgaggtttttggccacgtcgactgcgagcgacttcaatggcgaaacatacagcacacgcacgcccgcacgccgcgtacgagacacggtcatcagccggtcaatggcggaaagaaacgcggccaatgttttaccggagccagtaggagcgatgaccaatacgttccgtccggaatggatcgccggccatgcctgagcctgtgcctcggtcggctgaccgaaggcatgttcgaaccacgctttggtaggttcagaaaacagactcaagctttcgcacatatgttcgattgtagcgatgcggggaaacatcgtgaagattccggttgggagtccattgctcgcaggcggggcctgcgcatctctccctcacccgcttcacgggagcccctcgtcagagagggggcaaagggaatcacatcatgaccgccccttgtgaggaatcagtcttatcacagaggggaaccgatcgggtctcagctgaagtatgcgatgacctcgtcggcggtgccgtaggcgctttgggcgccgatcttcgtggcggcataggcggaaacataggagccgatctgcgcggactgcagcagcgtatagccggcggcaagccccgcaagcacggtacccatgaacgagtcgccgcaaccggtggtgtccaccgccttgacttgcgctgcagacacacgatgccaacggccgttttcaatcaccacggaaccggatgcaccaagcgtcacgatggcgcgatcaaagccgtaatccgtgaatcgttcggcgacttcataccagtcgagcgactccacatcgccgtccggcagccccaacagctgggccacttcatgctgattgaccagcaggatatcggtaacctccaccagttcatggggcagctcgtccatgaacggcgagtcgttgagcagcacagtcacaccggcgtcatgcgcagtctgagcggcggcgaccacggtggaaatcgggctttccaggcacagtcccagcactgagcaaccggcgatggtcaatcgatgcgactgcacatagcccgcagccgccttggaattggctcccggagaatagacgatggtgttctctccctcggcaccgacggtgatcaccgtggtgccgctggggccttcgacatgcaggacatcggcggtgtcaacgccggcctcgtccagtttgctcagcaggaaatccgcattggcatcgtcgcccactgcacccagcagctggacgttcaagccgagacgggctgcagcggacgcctgatttgcacccttgccgccgggcatcaccttcatggcaccgccctggacggtctcacccggcttgggcagtcgtttagtcgtcactgtgtgatcggcattcatcgaaccaattacgattaccgagccctgcgcatccttcagcgcttccagtcgttcccgtacgggctccggcatctgttcatgttcttcttcacttatcaccatgggctacaagcatagtaagcggagagcccaaacgtgcacacggtcagccgcgcagcttgcgcagacgctcatgcatagccaccatgagcaccaacagcaccagcaaataccatggatacaggctgatggtcacatactgcgcgatgacgccgaatagcggcggcatcagcagcgatcccacataggcacaggccatctgcacgccgacaatggcctgggaattatcctcgccgaagtagacgggagtcgaatgaatcacgcatgggtatatgggcgcacagccgaggcctacgataatcagccccgcaaccacaccaagatgatgcggaaacggcacaaacataacgaggataccggccaataccagtacctggccgaggcggatcataaccgggtccttgaatcgcatggtcaggaagccggaaagcgcgcggcccacagtaatgcctacatagaataggctggcccagctggcggcggtgatcttatcgatgccgctgtgcatcaccatgtagctggaggcccatagaccagctgtggattcgatggcgcagtagcagaagaacatcacgaggatttctttggcgccgcgtatggccagtacaccggcaacgccgaggggtttacgctcggcgaccgtctctccatcagtgttttcgtccgactgcgcggtttcgccggatgattcgccggctgcggcaataccacgcttcttccacaacggcaggctgaacaccaaaatgacggtcagcatcacttgcaggatggcgatgtaccgataaccccatggccagccttggccttgcgaaagcgcatagcccataatgtacggccccaccgatgcgccgacgccccacatgcagtgcaaccagctcatatgccggctttcgtaatgaatggcaacgtagttgttcaacgccgcatcaacgccgcctgcgccaagaccgtatggtatggcaatcagcaacaacacccagtaattcggggcgacggagaagccggccaaggccattgcggtcagcgccacggaaactgcagtgactttgcccgcgccgaatttcaacgtcatacggtccgagagcaacgccgagacgatggtaaacatggaaatcaccgcggaaatgccgcccgcccaagataccggcacgttcagatcttggctcatggtgggccatgccgaccccagcagggaatccggcaaccccaagctgataaacgccatgtagatgacggcaagcagcagactggccataacccacttcctatcccatagacgacactggctgtgataacgatgtcatcagtctatcgaataactcatgggcaacacgcataaaacatatgacaacgtgctcatctcaaacgccaattacggaaattctcggtaagcacgatgtcattatcagcgacgtcttcgatcaggtatcgatcttggaacggtcgaagtcatcggcgttatccacgatgaactgtttgcgaggcggcacttcatcacccatcaacagattgaagatctcggaagcctgggcggcgtcttccatgcgaatgcggcgcagcatgcgcgtgcgcggatccatggtggtgtctgccagctgatcggcatccatttcgccgagacccttgtaccgctgaatatcatcgttgtagccgatgcgcttcttatcgaggtcggccagtttgccggccaattcgtcatcggaatacgtgtagatgtattcgcccttatgcgagccggtcagcgcgatacggtgcagcggaggcacggccgcatacacgtaaccatgttcgataagcgggcgcatataccggtaaaacaacgtcagcagcagaatacgaatgtgcgcgccatccacatcagcatcagtcatcatgatgatcttgtgataacgcgactgttcgatgtcgaagctttggcccgaaccagcgcccaccacctggatgatggccgcgcattccttattggacagcatctgtgtgatcgaggccttctgcacgttcaagatcttgcctcgaatcggcagcagcgcctggaagccggcgttgcgggcggccttggcggtaccgagtgcggaatcaccttcgacgatgaacagttcggccacgtcgtcgttgcccggctggcagtcggacagcttggccggcatggaagcggattcgagcgcgttcttgcggcgcgtgacctctttggccttgcgcgactggatacgcgcgtgcatctcgccgacgatcttctccagcacgcgggcggactgctccttgtagccgcgcttggaaccggtgatcatctcgccgaactgcttgtcggtgagcctggtgacgatcggcttgacctgcgcggtaccaagcacatccttggtctgcccctggaactgcggttctgccacacgtgcggtgaccacggccacgagcccggcctggatgtcgtcacgctccaccttcatggcggagtccttgaggttcaccttgagcttgcgagcgttgtcttccacggccttgcgaatctgcttggtgatagcattcatgaagccgtccacgtgcataccgccgccaggcgtctccacgatgttcacgaaactcataatcgtggtgtcgtaaccattcacccaacgcagggcgatgtctacgccgcaagtgcgttcgatctcctgggcatgcagttcgccgccctcgcccacggcctgggtctcttccttgtaggtgccctcaccctgaatgcgccagatatcggagatgggctcgcctttggacaggaagtccacgaaatccttgacgccaccggtgtgcaggaattcgaccgtacgcggatgggcaggctgttcgccaaaagcgccatcaaccacttcagtggcggatgacagcgagaaatcctcctcgtccagagcctcggtatcgccgtcaacagacgcatcgtccgaaagctcggcgaatccgtcaagtggggagtcttcgccggagaatgactcggttgcgttagccgtttcgttcgcattcagtgattcggctacgactgcgacatcttcgttgggctcagtgccgaccgtatcggccccgttggtttccggcacgttctcatcgacgatggtgattttaagaccgggcactaggaaactggtctgacgcacacggtcgatgagctgctcatatgagaattcagcagttttattgaatatttccggatcgtaccagtaacgaatgcgggtcccggtggtcttgggcgaaaccttgccgatgatttccagctcggtgggcttgttcttacgggtacgtttgaacggcgagtccggagatgggttggctggatcagcgtctgcgtatacgccgggatgcccttgatggaaggccatgtgatgggttttgccgtcacgatcgacttccacatcaagacgggaactcaatgcgttgaccacagaagagcccacaccgtgcaggccaccgaccgcgttataggacgaattgccgaacttggcgcccgcgtgcagcttggtcaggacaacttccacgccggatagcccggttttcggttccttatcgaccggaatgcctcggccgttgtctgcgacctccaccgatccatcagtgtgcagagtaacgacaatgttgttgcaaaaaccggccaacgcctcatcgacggagttgtcgatgatctcccacaggcagtgcataagaccctgcgagtccgtggtaccgatgtacatacccggacgcttgcgtaccgcgtccagaccctcaaggacggataaatccttagcgccgtattcttctttgggcatacagtcctattttctaataatttggctcccctcttcaggggagccttcaacggatggctccgtcgtttgacagccctgtgggctgtcaaactcctcgcgcagtcggcctgctaagcgggccgaccgtcattgatccaggaagtcgcgcagggtctgcgaacgggacgggtggcgcaacttggacatggtcttggattcgatctggcggatacgctctcgggtcacgccatatacacggccaatatcgtccaaggtcttcggctggccgtcctccaaaccgtaacgcatcttgatcacaccggcctcacgcggagacagggtttccagcacctgcttgaactgctcctgcagcagggagaacgccactgcatcggacggagcaatggcatcggtatcctcgatgagatcgccgaactcggaatcgccgtcctcaccgagcggggtgtgcagggaaatcggctcgcggccgtacttctgcacttcctgcaccttttcgaccggcatgtccagctcgcgggccagctcgtccggcgtaggctcacggcccagatcctgcagcatctggcgctgcacacggctcagcttgttgatcacttcgaccatgtgcacgggcacacgaatggtacgggcctgatcggccatagcacgggtaatggcctgacgaatccaccacgtggcgtaggtggagaacttgaagcccttcttccaatcgaacttctcgacggcacgaatcagaccaaggttgccttcctgaatcaaatcgaggaacagcatgccgcggccggtatagcgcttggcaagcgagaccacgagtcgcaggttggcctccagcagatgatccttggcctttttgccgtcggcggcggcccacttgagttcacgcttgcgcttgaactccatgccttcactttcggtatcgagcagatgctgggcgtacaggccggcctcgatgcgctcggacaggtcaacttcctgttcggcgttcaacaggctgacgcgaccaatctgcttgaggtagtccttgaccgggtcggcggtggcgcctgccgcaatcacacgacgcttcggattgccggcggggatgatgttctcttcttcatcatccgtgtcggaaaccacataagcacccttttccttgggctgctcaggagccttcgatgcggccttgccttcgtcttcctcgtcttcgtcatcctcatcgtcaatgtcttcgtcgtccgactcggcatcggcatcttcaagatcatcgacgtcctcggattcgacgtcgtcaagatcctcatcaaggttatcgacgtcaagatcttccgggtcatcgctttggctgatgtcgtcctgagaaagctcctcctctttcttgaccttcttggccgaagtcttacgtgaagtcttctcatcggtcttggcagccgtggtgcccttcgtggccttggtcttcttggcggaggtcttacgcgcggtggtagagctggccttcttcttggtctcggtctcctcgctggactcggctgtctgcttggttgccgtcgtttccttcgtggccaaaactgctcctcctgatctcttgcctcgcagtgcgcataccacatgggcacacttctggcaagggcaaatcgtcaactatgtgagtaaaccaccctccacggacgattattcccatatcgaacaaggttcatgtcactgtccgagcacgccactcttcacaccgccccttcaaggcacagccgattacaccattttgagccctctaccccgagcaccaagccggcgccacaccccgctgcgcagcggaaaacaccatagccgccagagaacattcctcatcgagcaataggcactgcagggccatggtcaccgctcgggaatcgcccaaccaccataaggtgtaggccaccacagccagtggctgtacacaatatggcactggcgccgcatcggctatatcgagaagcatggcaatgcctgcatggcagcgttccttatctggcacgatgccctcgtcctcgaaagccacagtcagcaattcgcccatacgacgcttattccgtttgctgtgcggccgtgcggcaaattccataagttgcgttttggggcatcgttgttcgtcaataatcagggagagaatcagggcatcgcgtatcgagagcgtttcattcatgccgaccgcgaacgcagccatagtgtcacaatccaataccgtctccccgctgtccagattgaccagccactcatccagtgggtccgacatccagtcggcatctgcctgctgcggaccaagcgtctgcctggtctcatggaacaaacgagaaaggtcctccaaggcatcggcatcaaaaagattagatttggattccgcatgtttgcgggttttccgtttcgcgttcatcatgtcctcctcgacgtgatttccatgcctcacaattaaggctttatcttgtgtgcgcccgctcgaatgggcgtatgcccactatgcatgagcggcgccgtaaaccgggcaaaaatcgacctttgtggttccagcttcgcaacccccgatttctcaacgttcttgtgttcttcataacctgtggataagttattagtcatgtggacaactgctgacgaccttgcaatcatcgaaccgcgcatcatacaactggtgcgtgagctgactgccgcccctgataccgatgaggtatccgacgccttggaacccgtgatggcacaggtcgtcgatcaggccgcagcctccagccagggaggcaaacgactgcgggcgttgctgaccctggatgccttcgatgctctgatggcccagaccggcagctctactcctgatatgcgtgacgccatgactgatctcgcgtgtgccatagaagtatttcagaccgctgccctagtgcatgacgacatcatcgacgaatccgatttgcgccgcggcaaaccgtccgcgcaccgtgctcttgaacaggctgtgcacagtggcgccatcggccacgggcttggtctgatgcttggagacattctggccaccgcatgcatcgaaatcgcgcgccgggccgcgcgccgtcttgacaacaccgacgccatcaacgaagcgtttctgaccatgcaacgcgaagtggaaattggccaggtactggatctcgctgtagaattaacgccactcgaagacccggatgcgttggtagacgcctcgctgaacgtcttccggtggaaaaccgcaagctacaccaccattgcaccgttgctgttcgctctgctggcagccggcgctgaccccgctgaagcatggcagcaggcattggcggtcggacggcctcttggtctggctttccagcttgccgacgatcttctggatgttgtcggttccagccggaataccggcaaaccagtgggcggcgatatccgagaaggcaagcgcacggtgctgctggccgacgcactggccgcagcgggtacgcaggaccggcaacaacttatcgatttgtttgagtccgacgctcgcactgatgatcaggtggcatttgtcatcgcgctgttccaatcaactggagccgtcgaacgttcccgcaatcgtattcacgccttgtggctggaatcccgcgcagcaatcgccaatctcaatctggaacccgaggccgaaaaccatctgattgcagcatgtgcacggttcgttcccgaaaatcttcgttaggtttcgccgggcaaaacacccgtgaaaacgatgcgtccgtgtttccaaagcgtagccagtgccatgtagactaaacggtgttcagtcttatcaaaggaaccgtgcagtacaaccatgagtgagaacgagcccacacagatgattgagggacgctaccgcatcgtgcgcaatatcgccgaaggcggcatggccaccgtgtatgaggcggtcgatgagcgtttgggccgtactgtggcgatcaaggtcatgcacacgcagctggcacagggaccgcatcgagatcagttcgtggagcggttccgccgtgaagccaattcagccgcggccatcgcaaatccgcatatcgttcaggtttacgacaccggtgagttcaatggccttgattttttggttatggaatatgtgcatggcgtcaatctgcgccatgagatgaacgttcaaggcacattctccgtccgcgagacactgcgcgttatcgcggaaacgttggacggcttggcttcggcacatcgtgcgggcgtggtgcatcgtgatatcaagcccgaaaacatcctgatcaacgatcgcggccatgtgcaaatcactgattttggcctggccaaggccgccagccaagcaacgctgagttccaccggcatgctgttgggcactgcggcctatctggctcctgaaatgatcgagaataatcaggccaccccacaaggcgacttgtattccgtgggcatcatggcttgggaaatgcttgccggtaaagtgccttttgactccgataatccggtcacgcttgtgttcaagcatgttcatgaggatgtgccgtccatagccacggtctgtccggatatcgacctatccgtggcctcgttcattgcgcacctgaccgcccgccaggtcgaggctcgtcctgcgaacggctccgaggccgcccaggaacttcgccagttggctgccaaactccctatggaggcatggcaatatcgtttgcatgtcgagtctgcggatgccgccagaaccgatgctaccgcaccggctttggttggcggactggtttcgccggagaccgctcctaagcagagctctgacacgcccccggagcctcccaccgccccgaccaccgctttcgatgcgtcttccgcacgagaagaccttacgcaagtcatgcccaaccccggtaatgagacaacgattctggcaaagaccggggatgatttcgaccaggtgctcgccgctgaagacgatgccggaagccccgatgccaagccaacggacggaaagcgcaacaagaagccgctcatcatcgccttggtgattgttctgatactggctgtagctgccggaaccggcgcatggtggtggttcgcgggtcccggcagctattggagtgtgcccaagcccgatgacgtgacgtgtaaggagaacaccgagtgctcgttgtccggtgctgactgggccacgtatgagagcacgctgaaggtggcaggaatcccctataaggccgagaagcagtacagcgacgacatcgccgaaggcaagatcgtctccgcctcggtgagtgaaaacaacgctgttgtaggcagtcacgtcagcaagcgtcacaatcagcaactgacggtgacggtctcgcagggtgtacacatggtcaccattccgaacgatgtcctcgatacgaattccgcgaacggcaaggaccctctgtccgcgttgaagaaagcgggcttcgacaacatcaagcacgatgattcgaaggacgagtattcgctggataagccggaaggcgcagcgctcagcataagccccgaccccggcaccacgatcaagcacaatgatgaagtgacagtgacgctcagcaagggtcccatgcctgtcagcatgcctgacgtagtcggcaaaaccaaggatgagatgcaagcggcattcgatgagctcaagctcaccgccaacatcaccgaacaattcgatgacaagattgccgcaggcgaggtcatctccgcttcccaagacgctggcgcgcagctcaaatggggcgacagcgtagacgtggtggtatccaagggacctgagaccacggtgatgccgaatgtggtgggtcagcagtatgacgcggcagccgcacagctgaagaagctgggcttcactgtcaagaaatccgcaccgctgggcgacattacccatgtggtgcgtatccagagtcccaatgccggagaaacggtgcgtctacgcgacgaaaacggcactccaaccgttatcacgctgactgtggtgtgagaatcaaaagctccctctgatgagggagcttcattgtgggttattctgcagatgcttcttcttcagcggccttctgggctttcagctcttccttgactttctgggcgtactcgttcacgtactcctgaccgctcatcttctggatttccgcagaaatacggtcggtcagcgagcgcaaatcatcatgggtgatctcgtcggcggtcttcttctcaacctcaataggcttaccgtaaatcacctgcgtcttgcctttggctggaatcaccgtgcccggcttctgcagttcgcgcgaaccgataatagcggtcggtacaatcggacaaccggtttcaagcgcaagccgtgccacaccggtgtgccccttgtacatgcgaccatccgggcttcgcgtgccctcaatgtggatgccgaacaggtgtccatcttcgataatctcacgtgcgtgctccagagcaccaagcgacttgttgccaccggaacggtccacggggaacacgcccacggaagtgaaccaccacttcttgaacttgcccttcagccccttgccttcaaagtattcggccttgcccatgaagtgcaccatacgcgggcaggtaatcggaatcagcgcatcatcgatgacggccagatgattcgcggcaatgatggcaccgccggtgcgaggcacattattgagccccgatgcggtgggtccaagacgatgacgcgcgatgggtccaagaaccttgacgaagaaccagtagagcacttagcattcctccctcaaacggactggctattggccggccgcttgattagagtgacagttatgactgacaaccagaatagcaatgtcgacggagagcagccaatccccacgccgggcaatggacgagattcggccacgcccgcggatccgcaaaaggcaaccgataccggacataacgccaacggcaacggctccatgccgtccggaaagcatgacataggcaatctggatgacgcttgggcggcgttcgaggccgagcaccaagccgatttaaacgacgtggcatcctcccgtcaggccaagaagttcgagaagcaagccaagaaacgagagaaggaagcattgctttcagtggatgatcttgacattggctcgttcaccgatgacgcacgcccagaccgaggccgtaagggtggtccgcgcgatttcaccggttccagctggttggacaccgataatgtcatggacgcctatgatgacggcggattcactcccccgaacccggatcttggcccggtcaaagcgtctacgatgttgttggtggcgttgctcatcatcggtcttgtcggcgaaacagtgatgatattcgtccccggattaaatacgattcccctattgggcgcactgctcaatatcctcttcgggttgggcgtcattctgggactgggcggactggtcgccaaaatcctcaaccgtaaagaccgtcccggagaccaaggcggctactacgacgacggggcgcgcgtatagcgctctcaaggacaatacgcagcagtaattggttgacaataccaatgagggggccagctgttcggctggccccctcatttatctgaattcagttcacgccttggacttggcggtttcgatccacttgttgaacagggcttcggccttgccggagtcaacggtcttttcggccagagtgtaagcttcgccgaaacgctcggccagagtgccgttgccaaccaagttgccgtcagccacgatggcagatgcggcgttaagcagcgcggtggtacgggacgggatgtccttgccggccaggaagtccttgaatgtgttggcattgacgtccggcacgccgcccttgagctggtcgacggtgatcttagccagacctagatccacggtcgggtcgaaatcggtttcggtgactttgccatcacgaatctcccagacggagaccggaccggtgggcgcaagctcgtccatgccctcgtgcgaggtgtaaaccagaccggactgcccacggctggcgtacacagcggccataatcgggctcaccttgcggttggcgcagccgatggccacgtgtgccgggttggccgggttggtcagcggtcccagaatgttgaagacgcacggaatgccgagcgcggcacgaatcgggcccacgaagcgcatggccgggtggaaggtgcgcgcgaacgcgaaagtgatgcccacttcatcgccaacttcgccgaccgcttccggcttcaggtccagcggcaggccgaggtcttcgagcacatcggctgcaccgcacttcgaggaggcggcgcggttgccgtgcttgacaatcttcacgccggctgcggcagcagccacagaacccatggtggacaggttcacggtggcgaatccgtcaccgccggtgcccacgatgtcagtggtctcaccggagacattcagcggcacagcgtgggagaccatggccttggcggcgccacgcacctcatcggcagtcagtcccagctgctgctgcatggcgagcgcggcgcccacagcggccgggttcgcattgccctgcatcaggtcatccacggaccactccgattcctcagcagtaagatggtctcccccgaccagcttggtgagaatcgacttccatgtgatctcggccatgatgccctccttggcgttttgttacgccgtgttatgtatgttcgtcgtttattgtaattgcttcccatttcgcggcattgaatcttccatatagcaaaattggctcccctccttgaagagggaagccaatgcccagtattcagctaaagatgtgtcacttctcgttctggccgtggcacatcttatacttgcggccggaaccgcacgggcacggggcgttcttgccggtgccggggaaggtgcggccgtcggcccacggcgtcttgagctcgtcgctcttcggacgcttgttggccgggaccttgccttctgcatggctgatcggggcggggccagcgaccggcagggtggattcgccggactcggagacggcggcggaatcggcgatggcctgcttggcgtcctcgtcctcttcctcgacctcgccttcggcggcttcgacctcggactcgccgttctcgtcggggccggcggccacagtgacggagtcggcggtctcgtcggattcctcgacctcgtcaacggcatcctcggtggaggcgacctgcttgacgtcgatgtggaacagcaactggatggactcctccttgatggcctcgatcatggagttgtacatctggtagccttcgcgctggtattcgaccagcgggtcgcgctggcccatgccgcgcaggccgatgccgtccttgaggtagtccatctcgtagaggtgttcgcgccacttgcggtcgagcacggcgagcaccacgcggcgctcgaggtcgcgcaagccggtctcgccgatggtctcctccatttcgccgtactgctgcctggcgtcctcgacgatcaggtcgcgcacggcctcgacagccttcgcacccttgaggccgccgacgatcttcctgacctcgtcttcatcgaccttggttgggatcacggtgttgagcgccttgaacaggccctcccaatcccagtccttcggtttctcggatcccttgttggcacccttgatgtaggactcgacggtgtcggaaatgaaacgcaggatgtctttgtggatgtcttcgcccttaagcacggcctgacgctcggagtagatgacggtgcgctgcttgttcatcacgtcgtcgtacttgagcacgttcttacggatctcgtagttgcgggattcgacggccttctgtgcggtgcgcacgcccttggtcacggacttggcctcgatcggctggccttcctccatgcccttggccatgacctgggccacgagctgggtgttgaacaggcgcatcagatcgtcttccagagacaggtagaagcgggactcgcccgggtcgccctgacggccggaacgaccgcgcagctggttgtcgattcggcgggattcgtggcgctcggtgccaagcacgtacaggccgccaagttccttgacttcctcgtgctcgtccttgacctgggccttgatctcgttcagggtgcccggccagcgcttctcgtactcctccggggtgtcttccggcgagtagccctcggacttgagcttggcgtcggcgaggaactcgacgttgccgccgagcatgatgtcggtaccacggccggccatgttggtggccacggtgacggcgcccttgcggcccgcgacggccacgacggcggcttccttctcgtgctgcttggcgttcaggacttggtgcgggatcttggccacgtccagcagggtggagaccacttcggagctttccacggaggcggtgccgagcagcaccggctggcccttggcgtgcctcttggccacgtccttgacgatggcggccagcttctccttcttggtgcggaagatgaggtcgtcctggtccttgcggatcatcggcttgttggtcttgatcggcagcacgcccagcttgtaggtgttcatgaactcggcggcctcggtctcggccgtaccggtcatgccggcgagcttgtcgtacatgcggaagtagttctgcagggtgatggtggcgaaggtctggttctcggccttgacctccacaccttccttggcctcgatggcctggtgcaggccctcgttgtagcggcggcccggcaggatacggccggtgtgctcgtcgacgatgagcacctcgccctgagtgacgacgtagtccttgtccttgaggaacagctccttggccttgatggcgttgttgaggtagccgatcagggcggtgttggccggctcgtacaggttgtcgatgccgaggaagtcctcgaccttggtgatgcccggatccaggataccgacgaccttcttcttctcgtcgacgtcgtagtcctcgtcgcgggtgagcttcaggacgagcttggcgaactgacggtaccagcgggtcacgtcgccttcggccggaccggagataatcaacggggtacgggcctcatcgatgaggatggagtcgacctcatcgacgatggcgtagtggtggccgcgctgcacgaggtcagccttctcccaagccatgttgtcgcgcaggtagtcgaagccgaactcgttgttggtgccgtaggtgatgtcggcgttgtactgcttgcggcgttccggcggcttctggtcggtgatgatgcagccgacgttcatgccgaggaagcggtagatacggcccatcagctcgctctggtagctggcgaggtagtcgttgacggtgaccacgtgcacgcctttgccctcgagggcgttcaggtaggtaggcagggtggcgaccagggtcttgccttcaccggtcttcatctcggcgatgttgccccagtgcagggcggcgccgcccatgagctgcacgtcgaagtgacgctggccgagggtgcgcttggagacctcgcgcacggtggcgaacgcctcgggcatgatgtcgtccaggctcttgccgttctcgatctgctgcttgaacttcggggtctgggccttcagatcctcgtcggaaagggcggagatctcatcctccagcgcgttcacggccttggccacgttctccagcttcttgagctggtggccttcgcccattcgcagggctttgtcaacaatatcgaccacggggttctcccttgactgattgagtggtgatgtccgcgtaccagaatacagcccatcaccgtcagacatcgatatttttcgacctatttacaaaaaaatgggccgctccttgcgggagcgacccatttcatatcagctgtctacgtcagcgaaccagcaattcagtccttcttgacgttttccggagtgtcgatctcgaacacgccatagctccagccgtgacggtggtagacgacggacggacgtccggtctccttgttcacgaacaggaagaagtcgtgtccgatcagttccatctcgtacagcgcctcgtcgatgctcataggctcggcgatgtgcagcttgcgacggatgacaatcggcgtatccccaacctggacttccacagactcgcccgggccaagatcggaagccaccgcagcctgcggactgttgttcggctccccctccagctcctctggctccggctccggggcgataacgcccagatccaccggcaccgggttcgcgtagccgcgacggtgatccttacggcgatcacgggtgcggcgcagacgcagcgtcagcttatcaagcgccatgtccagtgcactgaactcgtcagtgctggaagcctcggcgcggaccacagtgcgtccggcgataacggtgatctccacgcgcttggcggtatcggcctgacgcgggttgccctcatgagtcaaaacaatctgcgcacgctgcgcatccggggcgatagcggtcacacgattcatcttggtctcgacgacatcacggaacctttgcttgatctgcgtgtgacgtccagtaacgacgatttccatgttgacctcctctagttcaagcggtttcccgctatgtgtgccgaacagcatcatcaccgtccgggtaagtttcattgtagacgaacaacgggtaaacagccggaaactcgcccatagaaatacgtttattttccgacttttatctgcaccccatcagtgcctatactgggtgtttgggccttgttcctcagcgccgtattttcggacggttcgccatttcgctatatttttcttttcgccagccggttctctatggcatatgtataattgcaagcttgagacctcttgatggccgcggccgtgatcttcattgggatcggctgaggaacttccgggctccatagagcacgatggcggataacgtccgcccagggtgacctgagagatagcgcagcagagaatagaccgcccgtcctcgacgggtaagggtgaaacggcggtgtaagagaccaccgggcctctggtaacagcaggccgcatggcaagcctcatcgggagcaaggccaagcagatggcggtaagggctgctcgcccatgtcatcgggtaggctgctagagtctgacggcaacgtcaggtcgagatggatggccatccgtgccgcgcgttcgcgtacggcatgacagaacccggggtataagaggtctcatttattcttttgcggctccgccgtgagtctctccctccggcgctacacaccacctccctcgtcagagggaggttattacgacagtaattcggcggcgacgcggcgtagggtttcggggctgtgccctttgcgcccgcctgcggaccagaaccggcgctgacgcacccgccgatcaagtccacgtgttttgcgggccacccgacgccccaattcccatgcggcatcttcgaatacgccttgttgttcggcctcaccgcacacctgctcggcgagccggcgatccacgcctttacgggcgagctccatcaccgcaccgcgcctgcccatcatgcggccggcacagtagcgcaccgccgattccgcataggcacgatcatcgatcagttgcacacggatgaggcgttcaatgacctcattgacgatttcttcgtcataccctttgccaagcagtcgttcacgcagcgcaccggacgagcgcggagccgcatccaagagacgcaacgccgcctcacggcaggcatctgcatcgttgggatcatcggcaaccgcgcccatacctcgccgagcgaatcgatgggacgactccgcatcgacgtttctttcgccctgttcggcacggcatcgttcctccaacgcaacgggattgcgctgaaggaacgcttctgcactaatcatgatcaggccttggcgcgagacgacttggcggcaggcgctgcagtggccttggtgtccttggcggcatcggccgcggcggcctcgctgactgcggcagctgcagcagcgtcttcgtcttcggcaaactgatcggcggaaccgatcaaaccaaattctgccttgaccttgttttcaatctcttcggtgatggccgggttgtccttgaggaactgacgaaccttctctcgaccctgaccaagctggtcgccctcataggtgaaccacgagccggacttcttgaccacgccgacctgttgggccatgtcgatgaccgagccttcgcgggagataccttcgccgtaaagcatgtcgaattcggcggacttgaagggcggggccatcttgttcttgaccaccttgacgcgcgtacggttgcccaccgcttcatcaccgttcttcaaggtctggatacggcgaatgtcaagacgcacagaggcatagaatttcagagccttgccaccggtagtggtttcgggattaccgaagaacacgccgatcttttcgcgtagctggttgatgaagatggcggtggtacctgcttgggccaaggcaccggtcatcttgcgcagagcctggctcatgagtcgggcctgcaaaccgacgtggctgtctcccatctcgccttcgatctcggcctttggcaccagagccgccaccgaatcgataacgatgacatcaagcgcaccggaacgaatcagcatgtccgcaatctcaagagcctgttcgccgttgtccggctgagaaacgataagcgaatcagtgtccacgccaagtttgcgagcataggccggatcgagcgcgtgctcggcgtcaatgtatgcggccacgccacccttcttctgggcattggccaccacatgcagggcaagcgtggttttaccggacgattcgggaccatagatttccacgatgcggcccttcggcaggccgccaatgcccaacgccatgtcaagcgcgagcgaaccggtagggattacttcgacattttgcacgggctgatcgccgaggcgcatggccgagcccttgccgaagcttttttcgacctgcgccaaagcagtgtccagcgccgccttacgcttgggatcgagctcgtgcttggtctcggttgccggatcttgggccggcttggtctcaagtgccatgatcttctccttatcgaagtcgtatgcgggcgaacgccttccaccgtatgggaggccaactcccatgacaagccaaaacgaccattgtggttccagcttgcccgatcacgcaagacaagaaccgcttattcccgccgaaacgggcgattcgcatcttgacatatacggcgtgcctatccgtcactgtggataactatagccacacaagcgaacatttgttcgaatttgcacaacgacacgccggcgagtatcgctcctcgacccagccaatgaaatcgaccgcccagcgccacagcatagagcccactacgcagcgggcagcggcggcgcgttatggtcacggccccaacgcttggaatcaggaatctccatctgatcgcagagcacgttccaaatcacgcgaggctcctcccccgcgtccaaagcctcaagaacggtcatattcgccagctgcggcatacgctgatcccgggccagagaccggccatagctacgaccgaacacttcttcaagcagctcccaaaattcccgttcacgcatacccgacagtgtgccaccacccgccggacagaaaaacccgcaccgccaaacggcgatgcgggtcaaacatcccagggggtccacccctcacacgattaacgttcgacggactcgaggtaatcggccaccatgcgcagcatctgtgcagtggacacacccagtgcgtcggaaatggagctcagcaattcggagctggcttccttctgaccacgctcgacctcggacagatagcccagcgagacgccggccttctcggacacctcgcgcagggtgcggcgatcacgtgtacgcaggtcacgcagcacatggccgatagcaccacgcaaagaaacctcacgcggctcctcttcgaccaccgcggtctcggcaacggcattgggctggtaggaggcggattcctgctcctgccacatacggtcacgagccgcctgacgctcatccttggccttctttgcggcctgggccttgagcacctgctgctgcgcaaacatcactgcacggcgctgggccggggtcaattcacgcatacgggcgacaccctgctgtacagccatcggcttcttagcggacacttccatttgttcgttcactcgggtcatcgtttccatcgccatagccccttccaaggtcggttcagtgtttccacttagtacaacacgatgacctcacggttttattccttaaaacttgctgtgaatagactcaagttttgcagaacatggaatacggtttggcggcgaacctcctcgcgggtgccactcaaacgcaattcgacggccttgactatctcgatgccatcgtcagcaagagtcgcagggatacgtaaacccacatagaccagaccagcgggcttatcgccgtccgggccgggaccagccactccagtggtagacagcccgataacacgatcaccgtattccggctgcgcatacaaccgcgcagtgccagccgccatctgacgcgcgacttcgggatgtacggcaccctcccgctccagcagcaagcggtcaacatgcagaatcgaggctttggccttgatgtcataggtgacggccgaccccagcagcacattggaagcgccgggaatatgcacaaaggcatcggagagcagacctccggtcagcgattctgcacacgctatcttcgcaccgcaagtctcgcatgcggcaagtatgcctgcggcaagctcgtcgcaggattgttgcagcttctcatcagtgctatcagtcatgtttggacttcctttccagcatatgcagcacctatacaacaatgggatgcggcggcaggccacatcccatcaatgccatccgttacacgaatgattccatcactgcttcttggagccgacgaacgtgttgtataggtagatgacgcccgagtagaggcacagcaccagagccacatagataacggcataggtcaggaagtagtaggcggtcatccagaacggcgtgctctggccgctacccagagaccacatcggcaacaacagcatggcaagacccacacattcaaacacggtcttgagtttgccgggccatgcagcggcgataaccttgccgccggggcgttccatcacaaagaaacgcatcaccgtaatgccgatttcgcgaatcaggaacagaatggtgacccaccaggcgagctcaccaaacgcagagcatacgatcatcgcaccgcaggtaagcagcttatccgcaatcgggtccatcagcttgcccatttcggtgacctggttgtatttgcgggccatccaaccgtcaatcttatcggtggaggcggcgatgatgaacagcaccgcggccacccaacgcatggtgaggttattcgcgccccactcacctgccatgatgtcgagtaccaggaaaatcaccacgagcacaatgcgcgagtaggtgaccaggttcggcggcgcgttccatccgtcgaacaatgatgatttgggcgttgactgcttgtccattgtgttctcatccatagtgttcacgttacccccacacttctaccttggtgggtattggctggagattgactgttattcttcggaaatcagactgtggcccagcgactgtgcaattgattctctccctccgccccttcggggcacctccctcagcagagggaggccaaaagatgattcactcaccaagctcgggctgctgaggtgccgaggattccagcgagctggtctctcctcgaataaaggcgagcacctgcggcaaatcctgcggttggacgagcaccgcacgagcctttgaaccttcggaggggccgaccacgccacgtgattccagcaaatccataaggcgtccggctttggcaaagcccactctgagcttgcgctgcaacatcgaggtggaaccgaactgggtggtgaccacaagctcggcagcctgcagcaacacatccatgtcgtcgccgatctcctcgtcgggctccagactgtccttcttctcagcctccttggccatctgttcgatgtcctcgcgatacttcggcttgcgttgcgtacgcacgaattccacggccttgcgaatctcggattcggaaacccacgaaccctgcacgcgaatcggcttggctgaacccatcggcaggaacagggcatcgccctgaccaatcagagtttcggcaccgaccgtgtcgaggatgactcgcgaatcggtggcggatgaagtggcgaacgccagtcgggacggaatattggccttgatcagaccggtgaccacatccacggacgggcgctgggtggcaagcaccagatgcacgcctgcggctcgcgccagctgggtgatacgctggatggagctttccacatcgttcttggccaccatcatcaaatcggccatctcgtcgaccaccacgagaatgtacggatatggagccaccttgcgctgggagccggccggtgcatgcaccttgccggcacgcacggcctcattgaagtccttgacatggcggaatccgaagtattcgaggtcggagtaacgcgcatccatttcctttaccacccattcgagagcctgcgcggccttcttcgggtcggtgatgataggagtgagcagatgcgggatgcccgcataggcggaaagctccacacgcttgggatcgaccataatcaggcgtacctgttcgggcgtggcacgcataatcaatgaagtcagcatcgagttgatgaagctggacttaccggaaccggtggcaccagccaccagcagatgcggcatcttggtcagatcagcggttacgaagtggccttcgacatccttgcctatgccggtaatcatcgggttcgggtcgttcacggccttatcggaacgcagcacatcgccaagatgcacgatctcacgatcctcgttcgggatttcgatgccgatggcggatttgccgggaataggcgaaaggatgcgcacatcggaactggccaccgcataggcgatattgcgctgcaggttggtgactttttccaccttgacgccggatccaagctcgacctcatactgggtgaccgaagggcctcgcaagaatccgacaaccttggcatccaccttgaattgctcaaaggtggaagtcagcgcccgaatcacgcggtcatttgccggcgtgcgcatcgcgtggggctgccccctggtcagcaagctcaggtcaggcagctggtatggcttattggcatcgtcctcagcatcgttcccattggcagcgtttggctggccatcggtattggggatgccttggcccacgccgctgccatccgcattggctcccgcataagcgccggtggcatcatccccggctgccgcaacggtggccatatcggtttgcgtggcgctgggcgcccatgggtcatttgtcgccggcccgctgggcataacgacagtatggtcggcagcaaccgcactcgtaggagcggcatcggcggcatgcgcggcaccctcataggccgaggacgcgatggtccgcccgcccgtgatttcaccggtcgccgtatctaccactggagtttccgcagtggcgccatgctggctggccgcacggtcgaagggatcgtcggcggcataccgatcaagggtctggtcgtcctccgtcttgggtttacgtccaaacagccgagcgaagagacccggtttgggcgtaccggacttgttctctccatcagactcctcatcggtgccagcatgcgcgggcacgccttcggcaaaagcgagcgtggagtctccaacacgaacctcgttggggaactgattgccgtcatccggctcctggcccttgggcacatacggcttgcgccggatcttggcggatagcttacgagcgtcttccggtatatcggtcacatgggtgccggtaatcatcagcagggagaacaatccgacaactacgaacacgataatcgcgaatacattggatagtccccaggcaagcggcgagccaaggaaaaagcccaatagtcctcccgcggattgcagaaccgcgatattgaaggatgtatggctggacgcgatggccacatcgagaatcgaacagacggaccacatcagcagcacccaaccggtgaccacacgtggattgttggatcccttgcctgagttgcgcatcaaacgaaaggccacagcagaaagcagcaccggcagaacaacactcatcagcccgagcacgccagacgctatggcatgcagcagctggccaaacactccgtcaacacgaaaccattcggaagcgcagaacagtacggcgagcacgagcaacaggaagcacaggccgtcacgacggtaggcgggatcgtactcaccgacgccggtgaccgcacgtacgccggcgcccaaggcgcgcggaatcgcaagcaggaccttcttccatgtgggctcaacatcaaggtcgaattcaggttggaccttggtctcgccatcatgggtggagttcccgccgcctttggatttgcggccattattgctgttggaggatgctgttcgtgccatatcgtgactgattctactaggacgggggctcatggccggtgacgacaccgtgacaatgcaggataagcgaaatcaccggtcactggttcagcgatttcatcgcggccattcccccctatcaacgtcggatatgccctatgatgggttgcatgacacccgcagagcgtgcgagcgcagtcgcatttgcactgaagaactgcgcactggaagctatgacgccgggcgaggcaacgatgcgagccgcggcctcctacgaacgcggtttggaagccgtgactcatctcattgatgtggccgatgagcaaaccgctatgcgtttgcgtgccgcagcgagttccgcgggcacggatcgtttggctgcaggcagtcttgatgatcacgccacggatcgtgccgatgccgtgttcgcccgtaccgtgttgctggcggaacgtcgctggaacccttcaggcgatttggatgagttgatcgccatacacaaggatctcttcgagggcgtgttcgaggatgccggcaagctgcgtacgtccaacaccacgcgtgaagtgaccaatgaccgtgagcgtgccgcgaatcctgaggcgttcttcccggctggtctgattgagaccggcgcgcataatatcgcgacggaattggctgacaaacgcaacctgcatgccatggatcgcgatgtgttcgtacatgcgtttgcgtcgctgtatgacgaattaggttatctgcatccgttccggggtggcaatgccatggtgctgcgcatatttggctcacggctggctcatgatgccgggtgggatcttgattggggcgaggtgacacgcgaggaataccgttccgccaaacacacggcctatcgcggtgacatctccgcattcgaggatatgttcgaccgtattctgcgtcccgccaatccaacgcgcgtattccttatagccggttggaaccaaggaccagcacactgatttcctgtacttggcttccctctccgaggggagttggcgccgcaggcgactgaggggagccacacggggtcaacctgaggctcccctcagtcagctttgctgacagctcccctcgaagagggcagacacgtgatttatgctgcgatatctcccagatgatgttgggtatattcgtcggcacgggcgtcaatggggtcatagtcgccggcatcggcatgcgcgatgatggccatcgcattgtcggccagcttcgggctcagcgcctgcagccaatggatgcgagggtcgcggccgaaccaacccatctgcttgcgggccaaccgcttggttttctgcgcgatatcggcaaacgcctcgttcacgtcccagatgccatccagtaggtcgatgacctgctgataaccgagcgcgcgcacggcggtgacgcccaaatgagggcggatacgttcgacttccttgataaatccatcgtcatacatctgcttggtgcgcaggtcaatgcgacgatccagatcaggccgatccaaatcaagaccgatttgtacagagggaatcacataacggtagcgcggcaagcttgccgaatacggtttgccagtaagctcgatgacctcaagtgcgcgaatagtgcgtcgcgggttgcgtggatccatacgcgcagcggcttcgggatccttggcacgcagttcatcgaacagcgcgtccgcaccctcagtcttttctcgttcctcgagccgcttgcgcacatcagaatcagtgccgggaaaagtaatgtcgtcaatggccgccctggcatacagccctgaaccgcccacgagaatcgggcggacatcgcgtgcctgcaaatcagcgatggtttgccgggcaagttgctggaaacgagcgacggtcatcgtgtcttccggttcgatgatgtcgatgaggtgatgaggtactgccgactgttcctcagcgctcgctttcgcggtgccgatatccataccgcggtacatctggtaggcgtccgcgttcacgatctcggcccgctcccccgcctcggccaaccgcttggcaatggcgatgccaagcccggtcttgcctgaggcagtaggccctacaatgctgacgactcgcttcatgttgttttcccctcgtacacttttgctcgtaccgtaactcccctcagtccgcttcgcggccggctccactcagagaggggagccgagaacttgcagttcctctctctgagtggagaaccctctcagtgtcgcaccgagtaggtctgcccttgagcaaggtcagggtcggcgatgagattgtggcgaccggcatgggtgacggtggccgtcacgaagtcgccaatctgcggcatgggctggccctcgggcacgccgatatgcaccagcacgccggtcttctcgcggccggtgactcgatgggtgtcggcatccttcttgccctgagtaccggtgatcatcacttcaacgtcacggccttcgaaggactgcagattctccgcggtgatctgttcctgcaacgccaccagtcggttgaaacgatcctggaccacatcgtgcggcacctgttccatctcggcggccggcgtgcccggacgcggcgagtagataaaagtgaatgcggaagagaatcgtgcctgacgcacgacatccagggtctgctgaaaatcctcctcggtctctccggggaaaccgacgatgatatcggtggaaatctgcgcatccggcatggcctgacgcaccttctccagaatcgtcatgaacttggatgcgcggtaggaacggcgcatggcccgcagaatcttgtcggagcctgactgcagcggcatatgcagctgatgcatcacgttcggggtctcagccatggcttcaataacgtcatcggtgaaagcggccggatgcggcgaggtaaagcgcacacgctcgagcccatcaatcgtgccgcaagcacgcaacagtttgctgaaggcgtagcggtcaccgatgccatatccgaaggaattcacgttctgcccgagcagggtgacttccttggcgccgttggccacgcactggcgcacttcgtcaagaatgtctcccggacggcgatccttttccttgcctcgcgtggtcgggacgatgcagaacgtgcaggtgttgttgcagcccacggaaatcgccacccacgaactcacgcgggaagccctggccgcaggcagttggcttgggaactgctgaagctggtcatcgaccttgacctgcggagtatcggcggcacggttctggttgagcagttgcggcaggtcgcagatgttcttggtgccgaataccgcagcgatccatggcgccttattggcgattttctggcggtcaagctgagccatgcacccgccaacggcaatctgcaggttcgggcgctgacgcttcatctccgcccacaggcccaccgtgccatacatgcgttcggcagcgttctcacgcaccgcacaggtgttgagcacaatgagatcgaggtcatggtcattgacctgttcctcggtggccggcacataaccatctgtctcgagcactccggcaatgcgctcggaatcatgcacattcatctgacaaccgagggtatggatgtggaacacgcccttgccgcgttcctgtgttgtaaggtgctcatcggattcaatcgaggcgcgctccgcctcggtcatcatgtcttcgttcataatgttcgattctatcggccgggttcgtcatgatgcgcggcagcggtccgcaccaactggagaaaccggtacatggagtatcttgggagattccccggcaactcccatatcgggcagcttgagccgagtatattgattgacgtgatacttgaccgacatagccgactgaacacttccgacctgcaagcccgactgaagacgctggacttgcccggcggcaccttcaataccgagcaagtcaccgaattcgtggatcagatgcaggtatatgaaggcgcaatgtacgaaatcagcaccaagctggaaatcctcgatgccgagttccaggtgcgattcagccatgatccgatacatcatatggaacggcgtctgaaatccgtgaactcgattatcggcaagctggaacgcaagggactgcctctcagcgtcaattccatcaaagacaacctgtttgatgtggccggcatccgcgtgatctgcaattatcgcgatgacgtgtattccgtgtcgaactacctgtcgtcgcagtccgacattcaggtgctgcgagtcaaggattacatcaagaatccgaagcagaacgggtaccgttcgctgcacgtcatctatgcggtgccggtgttcctgtcttcaggcgcgcattacacgccggtcgaagtgcagttccgcaccatcgccatggattactgggcatcgctggaacatgcgctgcgatacaaaaccgacctgccggacgccaaactgaatgagcattcgcagacgctgctcgactgcgcgcgctccttgcagaacatcgaagtgcagatgcagaacattcaccgcgatattaacggcgcaccgcaggtgggcgaagctcccaagaccacggactagtcttttctcaggaattttggcagtttggcaggggcctgcgccagcagagtgccaatgaagatcagcgcacagccaagatatccacgaggagtcatcacctcgccaagcagcagcgcgccgccgaccgcggagaaaaacgattccaggctcatcaacaggctcgcgcgagtcggcggcacccactgctgaccaaccacctgcaacgtgtaggcgatgcccaccgaaccgaagccagcatacagaatcggaatccaggaatgcgcggcaccggcccaatcgaccgagccctcaatcaaggaaccagtccaactcaacacggcggtagtacagaactgcccgaatgaaagtttgatggcatccactttggcacccagcgtgtcgatgaccaagatatgcacggcaaacaacacggcagtaaagaccagcagaatatccgccaacccgattgaaccgaatccgtcagtgatgcacaggaagtaaaagcccgcgatagacaatgccacggccacaaacaccagcacgccgatgcgccgacgcaggaacacaaatgccagtaacggcaccatcacgatatacatggcggtaaggaatcccgcacggccagccgatttaccgtacaggatgccatattgctgtaaagtgctggcggtgaaaagcacaatgccgcaaatcacggaaatgataatcgggttggcgagcagacgaatcgcaggcgatgaggtctgaaccaactgatctcccgcaccgactgccgcggtatcggtagcttcactggtactgctgctcccccggccacgctgccacagcagaatcggcaccaatgacaatgcacctagcgtgaagcgggtggcattgaagaacatgggggacatcgaatccatgccctgcacctgcgccacaaacgcaaagccccagatcagcgcggtcagcaacaggcacagcatgcctacgagttcttgtcttttcacggggagtcagcctaccgcccagatgtgtcgggcatgaaaaagcccggccacattgtggtcgggcttgatgcggtcgtatgccgcgaatcagttcatgactaatccctgttgcccagtaactggaggatatagaggaacatgttgatgaagtcgaggtagaggttcagcgcgcacaggatggaaaccctcttgaccatctccggcccctgagcctcgtactggctcagcaaagcgcgcgtggactgcgcatcgtagatggtcatgccggcgaacaggatcaggccaagcgcgcacacaatctgggtcatgccgtcaacgtgcaggaacatgagcaccagctgcgagatgataagcacgatcaggccgatcataagaatcgggccggccttgagcatgttgatcttggtggtcatgccgaacatggtcaaagcgaagaagaacgccgcagtgatgcccagcgcggtgacgatcgaaccaaggctgtacaccatgaagatggagctcagcgtaaagcccataagcgccgcgtacacatagaacatgacgcgggcggtgccggacttcatcttggtgactcgggcgccaagcaccacggcaagacccacctgaaccacacaaagcgcgatgaggccgatggcaccggtggatgcgaggaacgcgtaataggctcccgtcatctgcccgataaacgccactatcgcggtgacgatgacgccaatggtcatttcgccgtagaccttggttacggaagcgcggcgagcctcctcatagctgtaagtcatcgtcgtgttgatggccgctgtgcctgcacccgtgccctgcgcggcatactggtagttctgctgcgcggtgttgtaatcggaagtattgtattgcgggttgtactgcccgttgttctggggctgctgaccgaatgtcataatcgctcctttagcgttgtttcacgttccatactagtagagcaatgctgaacattccatgaatgagaacggcttttcgtgcatctcagctcgcggcgtaatgaataccgagttgttgatgattggtatgaagctcagtaccagtcccaaagcgccaaacaccacggcaacaacaccacagatcgtaaggggttgacgaggctgatgccgagcggtctcagcaggagcaatcggaccgggctgcgtaacgggttgctgatcggatcaagagggactgacgaacgcacggcggcatgcgcctgaagcaccggtatcgctggaggtttcggcttccccacaggccggcgttcatattcatatcagtaatccgatgcaggagcccaagaaccagccacatgccggttccacacaacccatcgcccagacgcctcagggcggagatgcgcacggcgcaggcttgcctggattagctgcacggcaccacagttcaacacagccagtcagaaacagctgattgacgatttaagcgagtctcaaccgcgctcgcgcagagatgaggcgcgcgaattgcttggtgcgttgcccgatcgtgagcgtgaagccgtgatgttggctgcggaaggctataccaacgccgagatcgcctcccgtatgttcatctcggaacgcacggcaaaagcgcatctttcctcggctgcggacaaactgaacatgggtcgggtacagatggctcgacttgtggagagggccggcctgcccgcacgattgtaagatgcccttccgttacgctcgcggcttcatcattgttaggacgtaacaggcataatgggcatatgagtgaaccgattatccgcactttgcgcaagagcgactacccggcattaatcgacgtggtgcgccgcatgtggtaccccgagtacgacgagaaaaccggcctgctggcggccgagaccgactgggagaactgtctggcgcgcgcgacctgcgcgtttaccgcggaactcgacggggaaccagtcgcgttgattctggggcgagtcgacgcgttggaccatcgcaggccgttgaacactcatcgcatcaattccttgcgaggtctgctgcgattggtgtgcgctaaggacggacttaaggccgccggcgatattctggggattctcaatatcgatgaacatctgcgtaaacaggctacgcagactggtcacgactactcggcggaagtggtgttgttcgtgctggatccggcggctcgtggacatggactaggccgccgcatgttcgataccttgatgaccgcattccgcgaagccggagtgagcaagtatttcctgtttaccgacaccacctgcgatgtcggattctatgtgcatctcggtctggcccaggtaggcgagcatacgctgtccacgaatggcgacggcgaacaggccacgtctttctacctctatgaggggctggttcccgagaattaaattaccctgctcggcatagacgacaaaccattacaaacgataaaggccggtatcttagaagataccggcctttgctcccctcagtcagcttcgcgctcagagaggggagccaagaaagttacttcatgaggttacgcagcacgtactggaggatgccgccgttgcggtagtagtcggcctcaccgggggtgtcgatacgtaccactgcatcgaactcggtcttggagccgtcctcgtgagtggcggtgacatgaaccgtcttgggggttacgccctcattgagcttctcgacgccggcgatgtcataggtctcggtgccgttaaggcccaaggactcataggattcgcctgccgggaactgcaacggaagcacgcccatgccgatgaggttggaacggtggatgcgctcgaagctctcggtgatcacggccttgacgccgagcatcaccgtgcccttggcagcccagtcacgcgaggagccggtgccgtattccttgccggccagcaccacgagcggcaccttgttatcgatgtagtcgcgggaggcttcgaaaatcgtggtcggcttcttggcgaggaagtcgtaggtgaagccgccggacgtcacctcctcgcccacggaggcgagcagctggttgcgcaggcggatgttgccgaacgtgccgcgcaccatgatctcgtggttgcctcgacgggaaccgtaggagttgaagttcttcggctccacgccgcgctcggtcaggtacttgccggccgggctggaggccttgaacgcgcctgccggggagatgtggtcggtggtgaccgagtcgcccaacagggccagcacgcgggcgccgtggatgtcggcgaccggatccggcgtggccttcatgccgtcgaagaaggtctgcttgcgcacgtaggtggacttgtcgttccatgcgaacagttcgccttccggcacgtcgaggcccttccagcgatggtcgccgtcgaatacggaagcgtagtccttaaggaacatctcgcggctcacggtgccgtccaccacggcggccacctcggagttggtgggccagatgtccttgaggtacacgtcgttgccatccgcgtcggtgccgagcggctgggtttcgaagtcgaagtccatcgtgccggcgagcgcgtaggcgatgaccaacggcggggaggccagatagttcatcttgacgtccgggctgatgcggccttcgaagttgcggttgccggagagcacggcggtgacggtcaggtcgttggtgttgatcgcctcggaaatctcgggcagcagtggtccggagttgccgatgcaggtggcgcaaccaaagccgaccagctggtagccgagtgcatcgaggtcgtcctggaggcctgcggccttcaggtagtcggccacgacctgggagccgggagccagcgaggtcttgacccacggcttcggcttcaagcccttggcgtgcgcgttgcgggcgatcaggccggcggcgatcatcacggatgggttggacgtgttggtgcaggaggtgatcgaagcgatagccacgtcaccgttctcgatgttgaaatcgccacggaagtcggtggatacagccaccggatccttgacggtcttctcggtctcgtaggcgggagcggtcttctcgaacatctccttggcttcggacagcagaatgcgatcctgcgggcgcttcggaccggcgatggacggcaccacagtgccgaggtcaagctcctcgtactcggagtactgcggttccacgtaatccgggtcggaggcgtcgccccacagcttgttggccttggcataagcctcaaccagcgcgacctgctcttcggagcgaccggtcagacgcaggtagtcgagcgtgacgttgtcgatcgggaagatgccgcaggtggaaccgaactccgggcccatgttgccgatggtggcacggttggccagcggcacggaggcgatgccctcgccgtagaattccacgaacttgccgaccacgccgtgcttgcggagcatgtcggtgatggtcaagaccacatcggtggcggtgacgccctccgggatggaaccggtgagcttgaagccgaccacgcgcggtacgagcatggagatcggctggccaagcatggcggcctcggcctcgatgccgccgacaccccagccgagcacacccagaccgttctcggtggtggtgtgcgagtcggtgcccacgcaggagtcaaggtaggcaagcgtgttgccgttggcctcggtcttgctcatgatcaccttggccaggtattcgatgttgacctggtggatgatgccggttcccggcggcaccacgcggaagttcttgaatgcctgctgcccccaacgcaggaactggtagcgttcgccgttgcgctggtattcgatgtccatgttttcctggaccgcgttggcgatgccgtacttgtcgatttgcacggagtgatcgatgaccatgtcggactgaacctgggggttgatgacctccgggtcgccgccgaggtccttgaccgcgtcacgcatggtggcgagatccacgatgcagggcacaccggtgaagtcctgcataatcacgcgggacggcgtgaactggatttcatggctgggctcggcgttcggatcccagtcaagcagggtcttgacgtgttcgtcggtgatattggcgccatcaatattgcgtaccagattctcgaccagtaccttcagcgagtacggcagatgatcgatgccgtcgagattggcgatgttgtagtaatcgaagtccttgccggcggccttcaaggtcgccagctggtcgtcgcgtaaggacatgcttcctccgaaatcatgtatcggcttgtctatgccgctgattatccgcttcaaatggtacgggtacgttactttgcctctggcgtgtcggcttgaagtgtgagacaattcgccgctattagatgttgaatccgtgttggcgcagcagcttgccggatactttgccgacaagcggcgccagccataggcagatcacgaaaatcagggccgaaccacccaaggcgatcagcgtggccaccaacgtagtgccggtcggcagaatcaacgcgaagaagttcgcgttgaacggaatgaacgcaccaatcactccggctgcggcaaacgccgcgaccagtatgcctcgccaactgttgaggggctgagccacgcgggcgagcacgaatacgcccatcaggaacaggatgatcgcgctggtggcacgcagcgcggatagatcgacgtttttagtcacgtcccagcccatgatgccgggcaggaaccatgccgtcagcagcacggacagcgcggtggcgatgccgcccggcaacgcgaaggtgaccacacgcttcaagaatcccggaatatagcggcgggtattgggcgcgagcgccagaataaacgcgggcataccaatggtaagggcgccaatgtacgtgatgtggcgcggcaagtatgggtacggaatctgggtcagcaccacaccgagcgaaatcagcgcggagtacacggttttgacgaggaacaggctggccacgcgttccatgttggccatgacctggcggcctcgcgccaccacatccggcagatgagagaactttgaatcgacgagtaccacttgggccacggctttggtggccggcgcggcattgcccatagcgatgccgagatccgcttccttgatggcgagcgcgtcgttgacgccgtcgccggtcatggccaccacgtggttctgcgtgtgcagcgcctggacgatggccttcttctggttgggtagcacacggccaagcacatcgacgttttccagcacgcgagcgagttcgttcacgtcttccggcagttctcgcgcgtccatgaatcgcggctcatgttcgccggtcagcctcactttacgggcgatggcaccaaccgtgaccggattatcgccggaaatcacgcgacagcgcacaccctgctcacggaaccaagcgagcgtctgctcggcatcctcacggatcttctcggaacacagcaccagcgccaccggtttggcctgcgggtcaatctgtggattgtccgtatcagcgagcgatgtcgtggaacgcgcaaccagcagcacacgattgccgtcattggcgtagtcattgacttgttgcagcacatccgaataatcaccgtcgagcgcggaaatgatgacttccggcgcacccatgtaccaggtttcacccccgctggcgggggctgtcatcgcaagatgactgggggtgatttcagtacggccaccctccgactcgctgcgcgagtcacctcccgccggcgggaggataggcttcaccaccgcactccatttgcgggccgaagagaacggaacgcgggattcgacttggcccggttcgtagccttgggcctttagaccggcgagcacggcctgtccggtgccgttgggctgttcctcgttgcagcagtcgtagagggcctgcgtggccgcctgttcagtcaatgtctcaaaagaaccaccctcagtcggctgcgccggcagctcccgccagcgggagccaagcatgatgagctggttgaaggcgatgccgccatcggtgatcgtgccggtcttatcgaggttgagcgcatccacgcgggcgagcgtctccacggattcaagttcctgcaccagcgtgttgtggcgagcaagccgcatggcggccaccgcgaagttcagcgaggtcagcagcacgaggccctcaggaatcatgcccaccacgccggcgaccgcggaaactacagcctgcctccattcgccggtggagagcgccgcatcccatccaccgaccgtgtgaatctgcgagagaatcagcagaatgcacaacggcaccacgaggaaggtcatgaacttcagaatcgtgttgatgcccttgttcaggtcggacacggtcttcttatagaccttggcctgagcggtgagcgtggcggcatatgagtggctgcccacggcattgaccttgaccaacgccatgccggaaaccgcagtggctccggaatagacttgctcccccactttgtggcgcacggtacgcgattcgccggtgagcatggattcgtcgagttccagtccccaggtctggatgatctgaccgtcggcaggcacctgttcgccggaacgaatccacagcagatcgccgagcacgatttcgttgtgcggcacttcgacatcctcgccgtcgcggcgcaccagaaaatcagaggccacaagaatggagagcttgtccagcgtgcgcttggccttgagctcagtgaaaatgccgatacccgtgttgatgatgatgacgaagccgaacaccgcatcccgccacgagccggtgaccagcaccatgaccatggccacgaagatgatgccattgaacaacgtgaatacgttggctcgtacgatgtccttaaccgaacgcgaggtggaggttttcaccgcattcgattggccgctttcaatacgctgcgacacttccctggcggtaagaccggtttcgctgatctcaggcatttccacagctgctgttgcactcatatcttccagcctaccgtgccagattccataattcgctacgattcaaggatgatttgatttagatttactctgtggcaacggcgatggtgcggtcgtggggttcgtcgcgtgcgatggtggtgactgcatcggcaatggagacagacttggcactagcagcatcgtctgtgttaagaatggcagcgtataacagttcgtcttcgggcgcatgcttgggattgatcagggcgacgggaataccggcttcgcgcgcattggtcagagcctggttccaactgtctcgattcgcgtcggtgacatcgatgccgctgatgattacgattttgactgcgcggtccacgaaatcggtgataccttgctgcgcggtggccgcgatcttgtcagcagtttcagaatcgcccggcgtatccagcgaggcgtaatacacgttgagagtatcatcggccagcgcatcgatggccttcttgtccgccgcggtatcggtcgatccgacgaaaccgacggtgatatccgttttgtgcgtcgaatcatgggcaatcgatggcatgctgtcttgcgtatcgccgacggcgcgaccggtcggtgtgcaagcggccaatgacaatacggccactccgcagaccaacaacctcagaattcgacgcatcatagactcacccgtcaacggctgaaaacggccactgtctcgacgtggtgggtcatcggatagatgtcgaaggcacggatgtccttgagctcgtatccttcgccgatcaaagtagcggtgtcgcgggcaaggctggtggggtcgcatgcgatatagaccacgctggagacaccggccgcagcgatctggtggcagaccttggcacgggcgccggcgcgaggcgggtcaagcaccacgatatccggcttggccaagtgcgcgggcacatgttccaacgttctggagacgtcaccggcacgggcatccacgtcgttcagattcatggcacgcaggttgcgctgggcattcttcacggccacgcgcgcgccttccacgctaagcatgcgagtgcgttcaccggtcatggtggccagtggcagggtgaacagaccggagcccgagtacaagtcccagatcacaggtgccacagcaccctgcaactgctggttgacctgattgatcacatgcgtgccgagtgcaatcggtgcctgacgatgcacctgccagaaaccgttggcatcaacccgataatcgaaggtcttgccgttgatggtcacctgttcagtgagcagctgggagccattacgcagctcgccatcgataagcacggcatagtcatctgcagcaatatcagcgtcgccacgcggctcaggtacggacagacggatctgggagccgggctcaaagccgccctcccacacatgctcgcgctcggccacgtccagcaatgcgcgggtagcgagaggcatggtgtcgatggccacgcgagtatgcgtaccgcgccggcgcatggacggcttgccgttctcgtcggcaatcatttcgatgcgggtgcgccagtgaagaccgtcaagctcctcatcaccgggcatgcgatcgattggcacggccacatcgatatgaccgagccggctcatctgctcggaaacggtgatggctttccacttgagctggccgggcagtgagacgtgcacgagatccgcgccgccgactcccccgcccatcgccagcgggccggcaagagaccaagccggatcgacacggtcctcggatgcttcgagcacttcgataacttcaccggtccagaaccgatcatcgcgatcatgaggttcgtcaagttcaatgcgtaccagttcgccgggcaaggcaaagcggacgaacaccacgcggccatcgatatgggccacgcagcggccctgatcggcgtatcgctcgatgcggacttcagcttgcatcgctgtcctttccggttttgcccgccacgggttcgctgacggcctcagccgcagatcccgattcggattgcgtaacgttctgagtagccacggctttatgacggtgcattggcgtggcgatgatgaggtagctcacccaaatcgccagcgcccagaacgggatgcccataagcagacgggccacgccaagcgcggccacatgattggtcagatacagcggcacctgcactgccaatcgcagcaggaacagaccgacccatagaccggtgatgatcatgtaggcacgtttcaatgccttatcactcatccagtcgttgaaccacgccttgaaatgctcggtaggcaggctacggataaattcgacgaccagtccgaggccgggtacccgtgcaatcaatgagacggcaagcaatgcggcatagccggcattggtaatgaatccgaagatgtagtagttacgggcctcatgggtctgccatgcccaaatcaggcagatgccgaccgccaccaggccggaaaccgcgcccatcaccgattggcgttgaatcaggcgcgcgataacctgcaacaccgccaaaatagccgaaacggcgatggtgaggttcagattgctcgtgaccacgaacagcacgacgaataccacgccgggcagcatggattcgataacgccacgcgggccaccgatggcgtcgatgacggagaaatcctcgccttcattgccggcgtcggctagagcggacaggccggtgcgtttgttgtctgccaagtctcttcctataaatcagcgaacttcggagaacatcgggccgcgagacagcgtggtcttcacttcggtctgctggtcctggctcagcggacccttcggcttgttgtccggaatgtccttgaagtgttccttgccattctcctcgccggcttcggcggcggccttgcgctcggcaggtgccacgggcgggtgcatcggaatcagatcgcgcggagccagcggctcttcgccgcgctcaaccacgatgtccgcaaagaacttgttcagtgcctcggtctccgggctgtccggatcggtggcagcgacaccggagaagatgccacgcagcatccaacgcggaccatccacgccgacgattcgggtgtccacggtcttgccgcccttgacgttgaccggcagcttcagctcggtgccaaacacgccttcgacctcggatgcagccttgttggcctcaatcagatcagcgcgcacatcatcccagagccccagggtcttgggagccgcgaacgcttcgatttccaagctggacttgccataggtgatggtggaaccaagcacctgctgggtggcgcggttggccttgatgcgcagttcgatgttctgcatgaacggcagatagtaggcacccagatccagatagtcatcgtagtcgggtacttcttcgtcgttcacatcccacggaccgcgttcctcgccacggcccacgtattcgctggaaggttccgccaatacggtttcagcgctttccgcctttgctgcggcgtttgcggcctcggcagccaccttgtcctcgtcgacaggctctacggccggctcggtttccttcttgtccttcttcttgccgaatccgaacagtcccatgattcctcgtttcgtataacggttgcaaccttgctaacactagcactcaggcttagagaaagctgagcatcgcggccgccggtgtccggttcgattcgtagggaggccacaatagtatggccgcatgaccatcaccattaccacgtctaacgtcaacggcattcgtgcggccaagcgcaagggcatcgaggattgggccggcaagcatgcaccggatgtctggtgcatgcaggaggttcgcgcacctcaggacgatgtcgattctattttcgatgaatttggtttcgaatatgccactgccggcaaaatcgacgcgccggccgacctccataccatgaacgaggtctgccgggtgaaaggccgcgcgggagtcgggctgctcactgacttggaagtgcttgacaagcgatatggtctgccaggtctgagcgaggatgtggattcggggcgttggatcgaaaccgatgtcaaaacgcctgagggctatacgatcaccgtggcatccgtgtacatacatgccggcaacaccgatgatccgaccaaaatggaacagaagtatcgttttctggacactatgctggcccgcatgggcgcgcttcgtgatgaagccgcacatggcggcaagcaggctgtattatgcggcgatttcaacatcgcacacacgccgctcgatatcaagaacgccaaggtcaatgagaagcacgccggattcctgcccgaagaacgtgcctacgtggacaaatggctggacgaatacgagttcgtggatgtgatgcgttcgttggccggtgatattcaggggccgtacacatggtggagccaacgagggcgcgccttcgacaacaatgtcggctggagaatcgactaccagttcgccacgcccgagctggcggagaccgcacgcggattcgtcatcgacaaggctcccacgtatgacaaacgctggtccgatcacgccccactcacgattacatacgaggtatgacgtattctgtgggacaacatccgaaaatcgacgattttcgcgggtcgtcccacgccccgcatcatgagtaatcatcgactacgccaagaatggcgtaattccgggcttcgtgagaaatctactgtgggacaacactcatgtctatcgattgatgttgatgttgtcccacaaattgtgggacaacatcggaaaaacaccgatttttgcctttcgtcccacgcgaaccatcatgcaaaccgacacatatgagtattggggtctttccacggatggaaagaccccaatactatgcgctcaaacgcagattatcagtccagaccaagctggagcttgccgccggggatggcgtcgagcaggtctcgggtgtactgcttctgcgggtggtcgaagacctcatcggtggtggcgtgctccacgagcttgccatgctgcatcaccacgacctcatcggcgatctggcgaaccacggccagatcgtgggtgatgaacagatagctcaggcccttttcggcctgcaggtcgttgagcagacgcagcacctgatcctgcaccagcacgtccaaggcggagacggcctcatcgcacacgatgacgtccggatccagagccatggctcgtgcgatggcgatgcgctgacgctggccaccggaaagctcgttcgggtaacgacccatcacggaagccggcatctcgaccatgtccagcagttccttgacacgattggcacgcgacttcttatcgccaatcttgtggatgcgcagcggctcctcaatggaacggaagatggagtacatcgggtcgagcgaaccgtacgggttctggaacaccggctgcacatggcggcggaaaccgagcagatccttggccttgaacgtggaggtgtcgcgaccttcatagaacactttgccggaagtgggcttcagcaggtgaagcaccatgttcgccacggtggacttgccggaaccggattcgcccacgatggccagggtggtgccacgcttgacggagaaggacacgtcgtcgacggccttgaacatctccttcttgcggggcagcttgaattccttggtcaggtggtcgacggtgatgatgtgctcgcttttctcaagcgtgctttcgccggcgatgtggtggccaagcagggcgtccgcgttctcaccgcgctccttggcggagatgatgcgctgggaggccagcgacggggcggcagccacgagtcgcttggtgtacgggtgctgcgggtgctgcagcacctcgagggacggaccggattcgacgacctgacccttgtacatcacgacaatgcgctgggcacgctcagcggcaaggcccagatcgtgggtgatgaacagcacggcggtgcccagtgagtcggtgagcatgtgcaggtggtcgaggatgcgcttctgcacggtcacgtccagagcggaggtcggctcgtcggcaatcagcaggtcggggcggcaggccagaccgatggcgatgagcgcacgctggcgcataccaccggagaactcgtgcgggaactgacgggcacgggtagcggcgtcgggcagaccggcctcggacagcagacccgcgatacggtcatccattgtggagccgatgacgtacttcttggcgaggtaccaggcctgatcgtcggccacgccggccttgatgaggtcgtcggccacgcgccaacgggtttcggagcccggaacccattcgttggtgaagcgggcgacggccttgtcgaaggcctcgccggacacgccggcttcggtcaaagccttcttggcctcggtcatgagttcgggcagttccttggcgccgaggaaggtctcgtcgtcgttgcccttgacttcgacctcgtcaccggccagggccttggcgagggcggagcgcttctcatggtccacgtccatgttgttggccttcagcgcttccttgacctgggtgccgatacgccacaccgggttgaggttgctcatcgggtcctgaggcacgaggcccatcttggtaccgcgcagcttgtcgaactcgctctgcttggcgccggcgatttcctcgccgtcaagcttgatggagccgttgaccacgtgaccggtgccgggcagcaggcccagcacagccatggcggaggtggatttgccggagccggattcgcccacgatggccacccactggccggggtagacggtgaagttggcatcgcgcaccgcatgcaccggcttgccggtgtcggtggtgaagtcgatggccaggttccggacttccagcagcgggccatgctctttctgcatggccagcatcgtggcgttggtattgtcagtcattgtctttctccactccccttgctcaggccgttcggctcttcgggtcgagggcgtccttgacggcgtcgcccatcatgatgaacgcaagcacggtgatggccagtgcggcggacgggtagaacagcaccatcggatcggtctgcaggttggtctgcgcgctggagatgtcgccgccccagctcaccgtggtggtcggcaggccgacgccgaggaagctcagcgtcgcttccgccacgatgtaggaggccagcgaggtggtggcgatgacgatgatcggggccaaggagttcggcagaatgtggcggaacaggtttctggccggcgtggagccgagggccgtggaggcggtgttgaattcgaggttcttcgattccagcacggcgctgcgggcgatgcggcatacgccgacccagccgaagagcgtcagcaccagcacgatcttccagatggacttggaggtcttgaacatctggagcaccacgatggcgccgagcagcatgggcagggcgaagaagatgtcgttgatgcggctcagcaccgcgtcgacccagccgccgaagaagccggcgacggcgccgatcagggtgccgacgatcacgaccagcagcgtggagagcacgccgacggacagcgaggtgcgcgtgccgtagatcacgcgggtgtacacgtcgcagccctgcaggtcgtagccgaaggggtgtccggcggaggcggggctcaaggagttgcccaggtcgcaggcgttcggatcctgcttggtgaacagaccgggggcgatggccaccacgatgatgaacaggatcagcaagccggagatgatgaacagcgggttgcggcgcagggttcgccaggcgtcggcccacatgctggtggccggtgcggattcatcgacggaatcgacgtcctgcagcggggtctcctcgaggggggctacataacggtcctgaccgggcagggtttccatgaagtattcggttcccggctcgccggtctggttgagctcgttttcagtggtttcgtttgccatgtgactcacttctccctatcacgcgtagcggatacgcggatcgagggccgcgtacagcatgtcgacaacgaggttgcacactacgaaaatcagcatgagcaacgtgacgatggacaccaccaggtttgcctcgcccttcagaatggactggtaggtgaggaagccgatgccgtggatgttgaagatctgctcggtgatcatggcaccacccatcaggccgccgatgtcctggcccaggtaagtgacgactggaatcagggagttgcgcagcacgtggcgcagcatgacctgaccgttcgacatgcccttggcgcgcgcggtgcgcacgtaatcctcggcgatgttggaggagatttcggagcgggtcagtcggatgatgtaggccatcgacgccgatccgagcaccatggccggcatgagcaggtcgaggaagccggggtcggcgcctgccgtcaccggcaatatcgcccactgaataccaaagacatattgcatgacaaagccggtgacgaaggtcggcacggaaataagcagcagggagacgatcaggatgacggtgtcgtaccacttgccctttttgaggcccgagatgatgccgaagaccacaccgaagatcgcctcgaacacgaacgccatcaggccgagccggatggtgaccgggaaggcgcgggcgatttcgtcgagaacaggctgcccggcgaaggtatcgccgaagttcagggtcagtgcattcttcaggtagataaagtactgaacgatgaacggctggtcgagatggtattctgcgcggatctgggctgcgacggcctcattgacaggcttgtctccgaacatggccttgacggggtcgcccggcagggcgaatacaagggcatataccagaagagtcgtaccgagaaccacggggatcatctgcagaatgcgtcgcagaagatacttacccatacggttgctccttatttcctagaccggccagaaagggtataacaagaccccttccggtcgataaatactccgacagtttaccgcatgcccggactgtgatatgtaaatttgcgttaacgcaaggtttgagattgggcaatactggtggatatgtccatggttgcggtcggatagtggatactttaacttggttcccgctgtcgggagctggctcgcgaagcgagactgagggtggttcatcatggtgtcaccaccctcagtcgcctacggcgacagctcccgccagcgggagcaagcacccctcacacaacacaataaagggcggggatcttgcgatcctcgccctttatttccgaactacctaacggtatccgttcagtgagtcagactcacttcttggacatctcggtgtaggtcgggaggttctgccaatcgaaggcgtagccggacttcacgttgagggaagccgcaccgttggcgttggagtagtacagcgggatggccggaaggtcgttgaggaggatttcctcagcctgctggtacagcttgttggcgtcatcgacggacttggcggcggcggcctgcttgcacatgtcgtcgaaggccgggttcttgtagtcaccgtcgttggagccgttgccgtcagcagcagcggtggagtacagctgccacaggtagttctcggcggacgggtagtcaggctgccagccggtacggaaggcgcccttcatctgacggttggtgacggcgtcacggaattcctggaaggtcgggatcgggttggtggccgcgtcgatgcccaagttgttcttgagctggttcacgacggcgtcgaaaatcggcttggcaccaccatcggcgttgtaggagaaggtgagctggccgtcgtacttggagatagcgtcagccttggcccacagttccttggccttggaggcgttgaacttcaggttgtcggcacccttgagggagtcggagtagcccggggtcttcggggaggtgaactcggtggcggcggaggcgttgccgttgagcaccttgtcgatgagctggtcacggttgatggccatggagatggcctgacgacgcagctgaccttcctcgtcgttcttgaagtgatcaagggaggacgggatggtgaaggtctggatgacggagccgacctcggagtaagcctggaccttcttgtcggtcttgaaggtcttggtgaaggcggccgggacggattccatcacgtcgaggttgccggcctgaatgtcacggtaagcggcggagtcgtcggtgtagaccttgaaggtcacgccatcattcttgggctgctcgttacccttgtagtcagggttcttgacgagggcgatttccttgttgtgatcccagtggtccagcttgtacgggccgttgccgaccggcttctggccgaaggccttcgggtccttgtagaaggactcgggcagcggggcgaaggccgagtagccgaccttaatcgggaacacggagtcggactggttcaggtcgacggtgaaggtggtgtcgtccacgaccttgaggccggagagctgctcgtcacccttgaggccatccttctgcagatcgtcatagccggcgatggcggagaagaaggaggagcacttctgggcgttcttggcgttggccacgtaggaccaggccttggtgaaggactcagcggtcaccggagtgccgtcggtgaacttccagccagacttgatcttgatggtgtactgggtggcgtcatcgttcggggtgatggactcggccacttcgttggaagccttgccgtccttgtcgaaggagaccagacgggagaacagcaggtcgaccggcttgccgccgccggtttcgttggtgttgcccgggatcagcgggttctgcggttcggagttgtacgcagtgatgatgttggagccagcggtgttaccggaggcagcgttgctgttggagccgccgcaggcgctcagcagcatggccacggagcaggccatggcagcgaaagcaagagctttcttcttcatatgatttctcctattcattaggttgcaggacgtctcagccccgcctcatgcgaacgggactggattccccgtcacccgtgagacttgcatctcacgatgtctcgaacaatccaacccgttgctgattgcctgacatttttgcgcacttgggagacaaccagttgcttttttgttacgcctatgtaaaatcatggtccatttaccggctatgttcagcctttgctaagtttgttaaccagcgtccacatagtggtcatgctcgggggaatgcctgaccgtaacggtttttgagctgctcgatggacacgtgcgtatagcgttgtgtggttttcaaggaggaatgcccaagcatctcctgcacttccctcaaatcagctcccccatccaacatgtgcgtggctgccgaatggcgcaaggcatgcgggctgatgtccggaacgcccgcttcacgtgcggccttatgcacgatttcacgcgccacacgctggttcagccgtttaccacgcataccgaggaacaaggctccctcgtctgaagaaataccgttcggggggacggctttttcaatcgccaaacgagccagcgctggccgtccataatcgatccagtcctgcaatgcctgctccgcaggcaatccaaacggaaccacccgttgcttgttgcctttaccggtcactctgacggtgcgattggaaaagtcgacatcacgaatatccaaagaaaccaattcagccacgcggatgccggtggcatacagcaattcgagaatcgccacatcccgctggcgttcggcgatttccctcgcccgatccgcgctccgcccacgagcggaatgaggaccatcagccgagaagtcattggagatatcacgattcttccgttgcagggcctcactatgctcagcacaatcaagaagctgctcggcctgcgattcagtaagtacagtcggcaaggtgttaggaatcgagggggtcattaatgtggcggccggattgacaccaaccacgccatgctcatagccccaagcgaagaaacctcgtaccgctacggttttgcgggccatactgcttctggcgtgattgtgcgattccgttgccatccaactacgcagatcattcagcgtgatttcgttcaggctgaccacaccacgcaactcgaataggtggagacaagcctcaatgtcgcaacgatacgcttttagcgtattagcggatagcccacgattagctctcagataggaaataaaggagtcgacgtcactgctaaaccgcatacttatcgctcctctgtcgagtcttgtgagcctactgtcagataaactataggcacagagcggccccatacacgggtacccctttgccgtgacaacgccaaccggccttgactcagggaacgaaaccgtattggccgcaaagaaacgaacttccatgatgattggggcagtatggcacggcacagcgcaaaaggcgtcgcacaaagcatcgaacaggccgaggaacagcacgaccatgtggtggcgcgggccgtagatctgacgaaaacctacggtgacgccgacagccaggtagtggcgctggatcatgtgaacgtggaattccagcgcggccagatgaccgcaatcatgggcccgtccggctcaggcaagtccacgctgatgcattgcatggcgggactcgaccaaccgacttccggcaaggtgtttgtcgaaggcctcgaagtgtcttcgatgggccagaagcagctcaccgacttgagacgtgcgcagataggattcatcttccagtcgttcaatctggtacccacgctctgcgctgaagagaacatcctgctgcctttgcaaattgcgaagaagccgattgaccgcgattggttcaagcaggtggtcaaggtggtcgggctggagaagcgactcacccaccggccaagccagctgtccggcggacagcagcagcgcgtggcctgcgcccgtgcgatgatggcccgcccgtccgtgattttcgccgatgagcccaccggtaacctcgattctcgttcttcacgtgaggtattgggcttcctgaagcagtccgtgaccgaatatggccagtccattgtgatggtgacgcatgatccgcgcgccgcctcctacgctgaccgtgtgctggttttggccgatggccatattacgcaggatctcgaccgccccacctatgagcagattcttgaggtctttgccgatgacggtgcggatgaggccggcaaggtggcacaagcatgatcaaaatcggattgcgcgacgcccgcgcgcatttcgggcgattcgtcatgtccatcatcgccatcgcactaggcgtgagctttgtggtcggctcgttctgtttccgtgaaatgatgaacaaccaggtctccgacatgatgggcaccagcgccgaccatgacgtatatgttcgcggctcaaaagaagtcaaatccgactcctccggcctgatggccgcctcgtcttcctcgaaaacctataacaccatcaacgtcgatctggcctcgaccatcggcgacgtcaagggcgtgaaaagcgcggaagtcgtgtattccgtgtccggcgcggtgctggtcggtaaggacggcgcggccgtatccaccatgggagcgccgacattggccgtgggctttggcaaggatgtgccatggcgttccgccacattcacttcgggcacataccccacctcggacgacgaaatcgccttgcattcctttgccgccgagaaggcgaatctgaaggttggagacaaaaccaaagtcgtctacccggacgggccgaaagacgtaacggtaaccggtatcttcgatctggattcctcgcttgccggtgccatcatcatcgatattccaccatctttggccaagacgtacgccacccagcaaagcgacgacccggataagaccgaccagatcggtatctacggtaacctcaaaaccccgctggacgagcaggcgcagcaggaactcgtcgaccgtatcaataaggcgttgcctgccggctccaaagcacatgccatcaccggcaaccagctgcgcgacgagtcgacccaatccgcgcaggaggcactgggcttcgttcagccattgattcttattttcgcggtaattgccctgttcgtgggctcgttcatcatcgcgaacacgttctcgatgatcgtgcgcgaatcaatgcgcggctacgcagtgctgcgatcaataggagcctcccccgcccaagtgttcaccacggtgatcgtgcaggcgattgtgctcggtgtggtcggttccggcatcggtatcgggctcggctggggcatggtcaaaggcatcgtcgcgatgatgggtcagatgggcacgccgatgaccggatcctcgaatccgagcgtctcggacatgctggttggtctcgcggtaggcctgatcgtcacgctgatcggcgcggcgttgccggccagtcgtgccgcaatggccccgcccattcaggcaatgaacgagaccgtgaacccggagaagccggtattgactcgcggcatcatcggcaccacgatgattgtggtgggcgcactgacctgggcctggacctgccgcatcgcagtggcggacggcgatccgacgctaatcggctggctcaacgacttcgcttcctggaccggcaccggctggccgcttggcgtgggcgcggcgcttatcgtcattggcgttattgtggcgggcccggcttgggtctcccctgccggcgcggttttgggctggattccggcgcatgtgttccaggtaacgggccggctcgccactcgcaatctctcccgacagaagcgccgcacctcgaacacggcggcggccctattcgtgggcgtggcaatcgtctcctgcctgagcgtggtggccacctcggccaaggcctcggtgaatgacatcgtcgacactggattaaaggctgatttctccatatcgtccgcggcatccggccagattcccgacaatgccgtcgaagcgattaaaggtgtagatgggctgaagtccgtgtcttcaaatcgaatgattttcggtgcgaagtatgacggcaagcaggtcaagggcatgacgttcgcggctcaggattccctgttcactgacgtgttcgcgcccgaaatcattgcaggtgacgcgaataaagcattgcgtggcggcgaactggtggtcggcgaggacatcgccgacgatcaaggatggaaagtcggcgacaccgtaaaggtgtccaccgagaacacgacggtagacgaggaggccaccgcccaggcacaggccgactatcagacacaggttcaggctcaaattcaatcgttgaccgaagaggcgcagaagctggcattggctggcgatgcggcgggcgcgcaggccaaatccgatgagattcagcaagtcacgcagcaggctcaaaacgtggatccggcaactttggtgaaaaccaagcaggtcacggtaaccaagaagctcaaagtcggtgcgatcatctcgaattcggtataccgttcgtgcgtgttcgtcaatgatgatttgggcgaccagctgggaaccaagcagacgatgttcaccatgcagatgtatctggtagccaagccgggcgagaatctcgacaagttggagcagcgcatcaagaaggcggtcaagccgtactacgtgatttcggtgatgaaccgcgacgaatacaagtccacgatgggctcgatggtcgatcagattctgttggtgctttatgcgctgttggcattgtccattgtgattgcgattttcggcattgtgaacacgttggcgttatccgtgtccgaacgcaccaaggaaatcggtctgttgagggccatcggcacgtcgcgtggccaggtgcgaggcatgttgggcatcgaagcgtccattatcgccgtgttcggcacggtgatgggcatggtggtcggcgtcgcggcaggcgctgtgattcgcgcggtgtacaaggccgacggtctgagtgtgctcagcattccgtgggatcagctcggagtgttcctcgtgctctcgattctggtgggtctcatcgcctccgtctcgcctgcctctcgcgcgctcaagcagccggttctggatgctgttgcctcggagtaactgctgccacctcgcaatattcactgatatctcggagtaacccactaatctcgtcatcattcatctcgcccagcgacagatattcaggaaataacccctttcgtcctgaacttctgtcgctgagtcgcagtcagcaacaggattttagggtgaagccgtttatttcctgaatttctgtcactgagttactgtcagcgacagtatttcagggcgaagccacttatttcctgaatttctgtcgctaagcagtcgttacggcctcggaggcgtgaccggacgctccggtatcggcttcaatgtggcgatttgctcctgatgaatcgtcacgttttgtgctggacgagagccgttggccgcggcgtcacgcaccagttccagcgtgtagccgtcccatgagaccacatgacccacgtaatcgcggaatttcatacgatggtcagtgggatccacgccctcggtaacacgcaccaccactcgcgcgcctgttggaatctgcctgggcaacgtcataatcatcatccccttgccgttcccgatatatcaacttcgatacgcattccactgtactcgtcgtacctgtgagcaacggtattgactacatggcagggcgcagctgaataatcgcctgacgcgggttgacgaagccgatgatggcttcacctctgcgcgcggaaaacagcaaggtctgctgccaaccggattcaggaacggtaagctcgcgttccggcaagctctcggctacaccgtcactcgcatgtgtgagtgcggacttgtactggcggaacgggctgccttcagcaaagaaccgaatcacgtcggtttcgtcgccgtcatgcaattggtcggccatatcagtcagacgcttggccatacggcaaagcaacgcttcgacattcaacgcatcctcctcgaccatcgcacgcgtgcgatcagggtcggtcagagccacacgggtcatatccctccagcagccagcggccaatgcggccgcaatattgcgatcggggtaggcagacagttcgttgatcagcgcggtggataccacgtgtggcatatgggagatcattgccgcagctttgtcgtgcgtctcatcgtccagcacgatgagacggttgccaacacctttggtaatcaaagcggccacgtcaaggaatcgttgataattcgtggcactatcaacggtcaccgcccatagtgcatcatcgtacagatgcgggtctgcagcctgccaaccggacaattcgttgccggccatcgggtgggcacccacatagcactcccccaatccggcggcttcgacctgctcgcgaaccatgcctttgaccgagcccacatcagtgatggtggtacgcggatgttcgcccataagaggagccaacgagtcaagcattgcaggcatggctttcagcggattgcacaacacgaccacatccggctcagcatccatgagctcagccaatgtgcttttgcagaatatgccatctgcctcggcttgagcataaggatgcgggcgatggttccatgcgactacacgtatgccccgctcggccagacgccgggcaagagaaccgccaatcagtcccagtccaatgattccgactgtatttaccacaacaattccctcctggcctcttcggtgtgctgccagccttctgacggatgctcagcatcgacatggacaccaccttcgggcaacatccatgcatcaaccggcgggctgggacgttcacgacgtgggtatacagccagagtcttagcccaatcaccatgttcggcaatttcttcgagcacagcatgaaacttgggctcccgcggcgcggcatcaagcgtggcgatgaaactataagtgccatcgttcccctttatggggcgggaaatgaagctggtcatattcagtcccgcgtcacgcagcacatcaagcagatcggccaatacaccaggacctgtgaccaacggaatgaatgtgatgatggtttcaaaatcgtcggcattatcgcggtgcgcgcgggcattgagatcctgaaccacatctcgcggagcaatgacaaggaattcagtgcgggctccctcgaaatcctgcacatgttcggcaagggtatccaggttgtacaactcaccacagatgctgggaccgagcgccacttggccgggctgcaaatcgcggcaggcagcggcattggacgatgagggctcgggcttgagatgatgttcggcgatgaatcgtttgcattgcgccagaccatgtgcgtgagcgctgacgatgccgccggtgcaatcataaatgccgtgacctcgcaccgtgaaagcattaaaggccacatccacactgacacgggcaaaacccgctacatcagtggcatcaatcagggcatcgagattgggcaccacatacccttcgacgttgttttcccaagcgatcacgccccaaccctgacgcgattcgacggcttgcatgatggcaggtacatccggtagagcaacgaggtcaaagtccccgagcggtgcgaaccgattggcggccgtcattgccgcctgatgggtgaatgtgccctccgggcccaaatagaacagtttcatgcgtgccataaggttctatggtagcgggtttgagggcgatggctgcgcttttgctcagcgatggtctctatcgggattgcttcggcataacgctgaaccagcgtgcgggaaggacgagcaggatcacttggacgagaatcaggccgtagagccagatgtatccggcatgctgggcgaagaacggcatctcgccttggaatccggcgacaatcagtgccttgcctgaggtggtggtcagggccatgccccagacagtcagggaagatgcgatgagatgcaaagccagaccaaccacgcccatgcgtgagcgggcacaccatgtcgacaggccgataatcaggaacgcaagaaccaatccgtatggaatgttcaattcagcccccatacgatgggcgaacgtgcccacaaaggcagacgccacgcccgccgcaatcgtgatcaatactttgaccagcacgttctgacgatgcgaccacggacgcaaatcggtattgctcttcacagtcatgcgtttcagtatagatatagacatgcccccgctggcgggggctgtcgaacgaagtgagactggggggtggtttacgatgaccaccccagtcggctccgccgacagccccccgccagcgggggcaattcggaatcacttaccctgctgggcggcgttctggcggcgctgcttggcgcgccacttgtaccagtcctcgcggccgaggatgatcttgcgcacgcggatggactcaggggtgacttccacgcactcgtcctcgttggcgaagtccagggactcctcgaggctcatcttgatcggcggggtcagggtttcaagcacgtcggcggtggcggaacgcatgttggtcatgtgcttggccagcgtaatgttcacatccagctcgtcgggcttgttgttcacgcccacgacctggccctcgtacaccggagactgcggctcgacgaagaagttgccacgggcctgcagacgctgcatggcgtacggggtggccacaccctgacgatcggaaaccatggaaccgttctggcggatggtgatctcgccagcccacggcgcatagccggcggacagggaggaggagatgccggtaccgcgagtggcggacaacagtgcagtacggaagccgatcagaccgcgggacggcacggtgaactgcagacgaacccagccggagccgtggttggtcatgccgtccatgcggcccttgcggtctgccatgagctgggtgacggtacccatgtactcttccggcacgtcgatggtggtgttttccatcggctcgttgaccacaccgtcgatcttcttggtgaccacctggggacggccgacggtcagctcgtagccttcgcggcgcatctgctcggcgagcacggccagcgccagctcaccacggccctggacttcccaagcgtcggggcgatcggtgggcagcaccttgatggacacgttaccgatgagctcgcggtcaaggcgatccttgatcatgcgggcggtgagcttgtgatccttgccttcggtgccggccagcggggaatcgttggtgccgaaggtcatggagatggccgggtcatcgacgtggatgagcggcagcggcttcggatcgttggggtcaacgatggtctcgccgatcatgatgtcgttgacgccggcgacggccacaatgtcgccggggcctgcggactcgaccgggatacggtcaaggccctgggtgcgcagcagttcggagacgcggaagttctcgagagagccatccacacgggacagaccataggtcttgcccttctcaagggtgccgttgtagatacggaccaggccgagtcggccgaggaagtcggaggagtcgatgttggccacgtgagcctgcagcggagcaccctcttcatattccggagccggaatggtggagatgatggcttcgaacagcggctcaaggttgtcgttgtccggcaggcctccgtcggcgggctggttggtggaggcgtaaccggccttggcggcgcagtagatgaccggcatttcgagcagctggtcgagattcaggtcgatgccctcgtgctgcacatcgtcggccaggccgagcagcaggtcggaggtttcgccgacgacctcttcgatacgggcgtcagggcggtccaccttgttcacgcacaggatgaccggcagcttggcttcgagtgccttacgcagcacgaaacgggtctgcggcagcgggccttcggaggcgtccacgagcagcacgacgccgtcgaccatggagataccgcgctcgacctcgccaccgaaatcggcgtggccgggggtatcgatgatattgagggtgatgccctccgggtggccgtacttggcagccagcgggccggtgtattccactgccgtgttcttggcgaggatggtgatgcccttctcgcgttccagatcgttggaatccatcacacgatccggcacttcctcacgctcgctaaacacgtgggactgctgaagcatggcattgaccagggtggtcttgccgtgatcgacgtgagccacaatcgccacattacggatatctccacgaaccgccatcgaaacctctcttaatactgattttcttgcgtaatcgttcggtacttgcgttctcgagtacttgctcttggatatctacctgtacctacacacaaaccgtcacgatgttactggcacaccttgacacacaacgggcccggctttctgagaattagtcacatgtcatctggcttgcgagacttgttgtattccacactctcgactcccctccctgaggggagctgtcgccgtgggcaactgagggggcgccaagtgcatccctgaatgtatccctgaatctcccctgaatcatccctgagtacagcatcgtcatgggtagttactgagtaacctaatatccaacgatagttactcagtaaccttcgcccaaggcaaaccgtctatgcaaaggggatgcggtatggcaatcagagaagcgctattagcactgttggagcgaggcccggccagcgcctatcagcttaagaaggacttcgaccgcaccatcggtctgacttggccgctcaatatggggcaagtttccactacgctgcagcggttgaaccgcgacggactgattgaagagaccgcgccgactactagcggatccaatgatgtcggcaccgcagcggccgcaccattatggcgattgaccaattccggcgcccaagagcttgaccgatggtggcgctcccccattaccccggaacaacgcggacgcgacgaactggtgatgaagctggccgtcgccgtggaaatacccggcctcgatgtttccgaactcatccaacaccaacgccacgctttgcagcaactgctgcacgacatcacccgactgcgccggcaaacaccgcccaccgaactcgccacacgtctagtactcgaccaccatattttcatcactgaagcggaattgcgctggctcgataccgtggatgagacccagctgcgagcacaactggcacagtaccccgtttcggcacctctcacggcaagctcagccgcactcaccgccaccattcaatagtgcataggagcacatcatgacttctcccgttctttcttctctcccgcaatcttccccatgcgcgctggaattacacgacgtcactcgcgttcacggcaaagatgcacgtcgtgtcaccgcactcagtcacgccaatctcacgcttcgcccgggtgaattcgtggccatcatgggccccagtggttccggcaaatccactttgctcaatcttgcgggcgggctcgatgtgcccacgcaggggcacgtgctggtcgaaggccgcgatctggccacactgtcagtggccgagcgcgcggccatccgccgcaaatcgataggctacgtgtttcaggatttcaatctgctgccttccctgagcgcagccgagaacgtgtcgttccccttggaattggatggctggaatccccgcaaggcacgtgaggccgcgatgcaatccctcaatgaagtgggggtagccgatatggctgatcgccgacctgaagacatgtccggcggccaggcgcaacgtgtggcgattgcccgcgcactggtcggcccacgccgtctactactggccgacgagccgaacggagctctggattccaatgccggcatgacgattctcgaagtgttgcgcacccgcgcagatcgcggcgcggccgtactgctggtcactcatgagcctcgcttcgccgcctgggccgaccgcacggtgtttttgaaggacggccgtatcatcgatgaaaccggctccagcaatatggatgatttgctcaaccttgaggaaaggggagcatgatggcacgcgcagccctcaataatcttgccaatgccaccgtcggtcgctctgcccaaattccccatgccgctaggccaagccttggcgcacgttgcaaccggtatcgggccgcgctgcgactcggctggcgcgacgcactacggcacaaggcccgcaccctactgtccttgctgctggtaatgctgccaatcgccgcaatggtggcctccatcggtatgaccaccaccataccgcccaccagatcgcgtgcgctggcgacaatcccggctgatacgcaggcggtcatcaccgccaccgccaggccccgcaccggccaaccgttccggcagtcacccgaaagcggcggcacgtggcaggacgatccctcccagcagccggcctcggccgccgagcttgcgaagattctgccgcaacaggatcggctgctcccgtattggcagtcgcccgaactcatcgccatcaccggcaccgcgttgcaacccggcgaacagaccaaggctgggatcgacgtgaaaagcgggaacgacattgatctgaacgcggcctccaccgcgaccatgaccgaggcttcacctgaggcattgcaacgaatgttgccgaagctggtcaagggttcggcgccgcagaataatacgcagattgtcatcagccgcacattggcggataatctcggcgcttctctcggtagcacggtgacgttcgtcgctccgccgttcgatggctggatgagcctggacgggcgcatcggcgaggcggtggccgacactcagcgtgcttggacagtcagcgggctgaccgatgaatccgaagccgcggcatggggcttggaaggctggatgtcagccatattggaatctgatggcgtcggcgtggatggccattatttggtggtcggtccagagccggtcacgtgggcgcacacccgcagcatgaacctgttgcaggccatcgtcatttcccgccatgtgctgactgacggctatccgcccgcatcgcagctctacccgatacagatcgatgcggctaccatgttgaaccacatggtcactgtggtcatcaccatgctggtgggtatgttgctggtactgtttctggtcacgcccgcgtttacggtgtcggcagatcagtcacgtcgtgtgcttgggctcgcggccgcatccggtgctgcaccacgtgacctcagtcgaatcatttcctcgcaaggtctcgttatcggcgccatcggtggcgtgctgggctcggcattgggattcgcgcttaccttggcggccggccctgcgataggtgcattgcgcggatccacgccgctggagatcctgcacggattctcgtggagctcgctgccgatgggtattgtcacggcaatcatcattggatttgccgcgacgattgcgccggctcggcatgtggcgcgtatgcatccagtcgatgcgttgaaggatcgcccgacaagagaggaaatcggctacggtgaatccgcgaatggcgtggatacgaagcttcgccgtaatcctttgagactgctccgtgttgcggttggtccgattctggttttggccgccatcgtatgcgccgcgctcagtctgacattgccattgcccacgctggccgatcacaatccgggcgcggttccggccggaaccgaagcgcatatggctctgcttgttgccacgattttgttggctgtcatagggcttgcgttgtcgattcgcacttttgcacggtggtgcggcaaagcgagttcccaactgaacatcggcgcacgcctggcactcagggatgcagccgagcatcatcgacggttcgttccggcggcatgcgcggtgctgattaccatgtgcatcgcctcgtacacactggtaatcaccggctccatggtggcggaccagcgaaattccacgatgacgatgacgtatggaccgtcggggatggccattggggccgacgtgcatgtcagcaatgagttcgaccgtgctgtggtgtcggatgcgatacgccggcttggcaaagagacaccgatacgcgctcattacccggtgtacaccgaggatgtcaagcgatggtcaaagctcaatgatacgaccgaagtcgattccgacaagttgaacgccgaacacggctacatgtatgccgctgcattgctcccggccggtcacacttgtgataacccaacgatccaagagcaaccggacacgtccacatgggtgggccaggatgccgcttcggccctgtatccaaacgttccgatacgttgtgtgccgatagaccgatcccatcagccaacgtattcgaatatactgccgagtttccgcggcgtgaatctcattatggatggcaatgcgatgcgtttgtccggcttcccgaacgcggatgaggcggcacaggtgctcgatgcgggcggtgtggtggtcggcgatgccggcacaatcgacgcgggaggtatggtgcgtgtggccatttcgccgaatccggcaattgcaaacgaatctcaggccacacatatcgagaagcgcaaggccatctacgtgcgcggcgcgtacccgctggtgatgagcccggcaacagcacaggcgctcggcatcaaacaattgcagtatctgggtgagtatctagacttcgccggtggcaactcccccgttaccgtaaagaaggcctcagcttatgcaatcgaaaatctgccgctggcatccacgagcactgacgggaatcgcctgccgtggggtgacaatatggcattggtgcccattggcctgttggcattgctggcactgatggccacgctcgtttcattgctgctggctcgcacgcaggcccagcgcgacatggccacgatggtcgccgtgggcgcgccaccccgattcctcagacgttacggcctgacgcaggctgcggtgattctgctggccggcgcgccagtgggcgtggtatccggcgtggcgttgggatggctgcatgtggcatggaaccgcaggatcggcgtggacggtcattggctggaaaccgtgccgatctggggattgcaggcggcgctggcattcggcgtagtggcaaccggactgctggtggcgtggctggtcacaaaaccaccgcgcaatctcacccgtcgttccctcgattgatcagtgacatacggcaactcttgccgtgtcattcgggagctataagacaaaaagtggcccacacattggtgtgggccactttagtagtgaaggctgaagtgtaatcagtcttcgagattgaggcctttgcgctcgggcaagcagagggctgctatgcaggcgaggatgaaggcggccgcgaaggagacgaggccgacgtccatggcgtcgaatgcccagccgacgccggaggcgacgaggagtttgcgatgcgccttgttgaacggcagtcggtcgaggcgctcgttgcgggtgagctgcgcgggttgcgctgaagtggtggtgctcacggcgtttcctttctggtagcgggggcagaattcgcgatatctgcgaaaaccaccccaggtcagctttgctgacagccccccgccagcgggggcaagttaatatcgggtgaggtcggtgtaggactcttcgatggcgaggctgatgcgttcgacttgttcacgggtcaacggtgtgcggaacgtcatacgcaatgccgatttagcaatggatggttcgagccccatagccagcagagtcggcggaatttcatgacgtccaaccgcgcaggccgaaccggacgaagcagcgatgccgcgtgcatccaaatcgacgagcagggcttcgccggtgacgccggggaagatgaacgaggcgtggcccggcaggcgacactcggggtcgccggtcaggtcggcacggggagccacgcggcgaaccgcgtcaatgagcatgtcacgggaggcaaccagttcgcgataatgcgcctgcatgcgcgcattcgactcattgagcccgatggcgagcgccactgcaccggccacgttctgtgtgcctgagcgcaggccacgctcctgtccaccgccggaaagcactggttcgatggatgtgcggccacgtaccagcagcgcgcccaagcctttgggcgtgccgaacttgtggccggaaacggatagagcatccacatcccaatcgcggaaacgaatcggaatctgcccggcggcctgcacggcgtccacatgaatgggcacgccatgcttatgggctatgcgaaccaactcctccaccggctccacagtgccgacctcgttgttggccagcatggtggagacgagcgcggtgcgctcccccgcctcgccgtcgagctcgtgttccagcgcgtcgagatcgagatgtgcttgcgcatccacgggaatatgcacgacgtcgaaaccgaaccattcatgcagccatgccgccgattgggccacggccgggtgttcgatggcggagatgataatgcgtgggcggtggtttgtcgtctgctctccagtctgcgatgaggcggacgggtcggccaggtcggtgccgaactgctcgccatcggcttcggcaagtccatagaacggctgtaatcccaactgccgcatacgtgccatggcaatgcctttgatggcaagattgtccgattcggtgccaccggaggtgaagatcacgtcatctggccgggctcccaatgccgcagcgaacgatgcgcgtgccgcgtccagcgcacgggccgcggttttgccgggctggtgcacgctggccggattggcataggcgtcggtcaggaacggagtcatggcttcgagaacggccgggctcaccggttcggtggcagcggcatcgagatacagttcgccagcttcgctggacgtgttgggagtatcggccatgatcagatccagtccaatccgaggtcgatgctgcgcacggaatgggtgagcgcgcctacggaaatcacgtccacaccggcggcagccacggccggaacacgctccagattcatgtttccactggcttccacgatggccttgccatcaatgagttctactccgcggcgagtgtcatcgagtgagaaattatccagcatgatcgtgtctgcgccgccctcgagcacggcaggaatctgctcgaggctatcgacttccacctcaatatgcgtggtgtggcctacctgttcgcgcacgtgacgaatggcaccggtcaggtcgataccacgtgcggcgagcgccgccagatgattgtccttcatcatgaccgcatcggacagtccgtaacgatggttgtggccgccaccgcagaccacggcatacttctcgaacgggcgcaagcccggagtggttttgcgcgtatcgacgatgcgggtgcgttcgtaacggtgaggacgggtgaccgatccgtcatagttgtcactgtagatggcgttcaccgcgtccacgaaagcggcggtcatggtggcgatgccgctcatgcgctgggtgaagttgagggcgatgcgttcggcggtaagcaggtcacgtaccggaccggttacgatggcgagcacttggccggcttggaatcgttcgccgtccttgatggcagcggtgacagtgacggctgggttctgcgtggtgaacgcagcgcgaaacacctcgatgccgctcatcacgccgttttcgcgtgcggtgagatgcgcagagccggtttcgcccgcggggatcgtggtctcgcaggtgatgtcgccgtagggtgcgtcttcggcgatcgccgcttcgacggcggtatggatgatgtgttgcgtaagcatgggtcaatccttgatgtaggcgacggagtgagcccattcgtcctgcggctcagcataatcggtgcgggcgtgggcgcctcgggattcggtgcgggcgagcgcggcggtggcggccacatagcccacagtgagcatattacggttctccagtgctccaacatcggccacgtcggcctgtgcgtttgctgtagcaagtccttgaccgagttcggcgatggcggtttgcagcccatccgcgtcgcgcagtacgccaacgccatgccacatggtgttttggatgcgggtgcgatcccacacatctgcagctgcagcatcatctgtgggcaccggggtcttcaatgcaattggcttatgcgtgaatgcttcgccggtggcggagttcaggaacggttcgggagcccagaccgtgtcatcaccgtccgcgactgcggccaaaccggcacggcgaccgtaaacgagtccttcgagcagtgagttggaggcgagcctgttggagcccatcacaccggtacgggcgcattcgccggcagcatacaggccgggaatcgaggcacgagcgtccaaatcagtgcggataccgcccatgtaatagtgcgcggccggtgccaccggaatcggctccttgctccagtcgaagcccagcgagcgcgtgtaggcgtcaatggtcgggaatcggtgggccaggaaggctgccagatcgggattctccttcgccatcggtgaggcatcgagcatgaccggcttgccgccctgacgttgcatcacgcggaagttctcgcgggccactacgtcgcgcggagcaagttcggcacgcggatccacgtctttcatgtatcggcgcccgtgctcgtccagcagtaccgcgccttcgcctcgcacggcttcggagacgaggaagtgttcgcccacggccatggcggtgggatggaactggtagaactccaagtcggcaacctgtgcccccgcacgccatgcggcggcaacaccatcagcagtggcaacctgcggattggtggtgtacgggtacatgcgtcccgcgccaccggtggccagaatcacgcggtcggcggcaagatccttgtcctgcccgtcaatcagcagccggacgccggcaatacggccgtcacgcacgataaggtctttgaggaaggcatgttcgatgatatggatacgcggattctcacgcaccatggcggagacgtccaactcaagcaccttgcctgtggcgtctcccccggcatgaaccacgcgggcacgagaatgcgccgcctcaaggccacgtagcatatgcccctgtgcatcccggtcgaagtgcacaccggccgcggcaaactcacgaacacggtcagctccctcacgggtgagaatgtccacggccttcgggtcgcacagaccgtgacctgccgccatggtatcggccgcgtgcagcttcgggtcgtcgtcggagaagatggcggcggcgatacctccctgcgcatggtaggtgtttgattccaccagttccgtcttggtcaccaaggtcacgtcatgaccggtaccggccacggccagtgccgcggacagaccggcgacgccggcgcccacgacgatgatttcaacgttgctcattgtgttgctttcctctgttttttggttcgctcccgctggcgggagctggctcgcgtagcgagactgagggtggttttaatcatccccatacaagaccaccctcagtcagcttcgctgacagctcccgccagcgggagccggagagaggtcacgggtgaacgcgcagcatgcgctccaatgccaccttggcttcgcgggcggtgtcgtcatccacgatgatacggttgaccacattgccctgttcgaggttttccagagcccaggccagataggccgggtggatacggtacatcgtggagcacgggcagaccaccgggtccaggcagaacacggtcttgtccgggtactgcgcggccagacggttcaccaagttgatttcggtgcctacggcgatggcggaaccggcgggcgcgttagcaatctccttgacgatgtatgcggtggaaccagtgccgtcggcggcgtcgaccacctgcatcgagcattcggggtgcacaatcaccttgacgcccgggtatgccttgcgagcacgttcgatctgttcgacggtgaagcgctggtgcacggagcagaagcccttccacaaaatcatcttggctcgggcgcaatcggccgggtcggaggcaccgccctgagccttgaatggatcccacagcggcatctcgctcagcggaatgcccatggcgcgggcggtgttgcggccaaggtgctggtcaggaaagaacagcacgcgcttgccgcgcgcgaacgcccattccagtacggcgtgcgcgttggaggacgtgcacacgatgccgccgttgcgtccgcagaatgccttcagcgccgcggaggagttcatataggtgaccgggataatctgctgacgaccatcggaatccggctcggtgccgcagatctcgccgagctgatcccagcattcctgcacctggtcgatgtttgccatgtcggccatggagcagccggcggacaggttgggcagggtcacactctgctcgggggtggagaggatatcggcggtttcagccatgaagtgcacgccgcagaacacgatatggtcggcgtccgggcgttcggtggcgttcttggccagctggaaggaatcgcccacaaagtcggcatgcttgataatctcatcacgctggtagaagtggccgaggatcagcagtttggagccaagacgctgcttggcgtcggtgatgcgctgctgcagttcctcatcagaggccttgcggtattcgtccggcagcacctgctggcgcggcgcgttggcgggcagacggtcgagcatcgaggcgccgggaccatagctgggtgtggtggtgtcgaagtgccacgggtcctgggtcagtcctgcatcgcaggtgctttgcgcgcccagcttggcgatgatctcgtcaacggagggcgcaatgaatgatgcggtcatagtggttcctttctgtaacgtctatgcgccgtgcctgcaggcatggcaaaaatcaaatctgtgcggaggggctcaatgcggcaagcacatccttgcgttcgttgcgcttggccattgccgcaatgccactgccgtcgaattcatgcggcgttccggtatgggcaggtagctgaggcacatatcggtacacggctgccggccgctgacggccttcacgcactttctcaccggtgtcttcaagatcgccggaggagagcattttgcgacggaaattcgccaaatcaaggctttctccggcgatggcctcgtatacgccgtgcaactgccgcaaagtgaaggtgggaccgagcagacgggtggccacgtcagagtattcgattttggagcgcaaccgaagcagtgcgtagtcgataatctcgcgatggtcgaaagccaacggcggcagctcatcctcggggaaccagcgcacattatcgccatcctcgaaatgcgcggcctcggcctggcctacgagtgcccagtacacgacggagaccatcggcaatccaccatgggagcgctctggcccgccaaaggtgtacagctgctcgaggtagcgaggatgcagcgcagtagttgactccaatgcggagtaagcggactgttccagcgaccaatcggacctcaggtcgcctccgggcagagcccaagtgccgaggaaaggctgacggactcgcttgaccaacggcaaccacagacgggaatgaggtgttccagctccggtctcagcagattcggcttgcgttgcgccatgttcgggcatgtcatcaggaccaagcgccaaaatcaccacggacacaccaacctgcggtggtgcactgcggcgctccgacacattgccgaatcccatgccttgcctctttccagtgaaatattctttctggtcagacagcatagcactacttatagtcataatgactataagtcacaatatatgcgagaacagtaacaaaaatggtctgcattaccgcagaccgtgctgtcaggaaaccggctcctcgtctgattcgccgggtcttgtcatttccgccacagacggcaggaacggggccaacgatggcaactcgtcaaggctattgagtcccatctggtccaggaaaaactcagacgtgaccagcagcgccgcacgggaatcggggtccatgccgttctctgcgataaggcctcgcacggcgagcgagcgaatcacgccatcggagttgacgccacggattgccgccacctgcgcacgggtgaccggttgccggtaagccacaatagccagcgcctccaaagccgcctggctcagccgcgcggtctgcccatcggtgacgaacgcggagacgaccggctcgaattcggcgcggttggcgaactgccatcctcgtgcggtatgacgcagttcaaatcctcgcgggcgaatgccacgagccgcatcaccctcatattcggcacgcagtgtctgcaatgcatcttctacgtcgccctcatccaccaccagcacacgggccatatcctctacagtctgtggctggtcggcgaccataagaatggcctccagacatgcggccagcccgccgggaaaatcatcgacggtaaagtccacatattcgggacgcgactgctccgctgcttccgtctgcccattatgttcgtcatattcgttgcgctcgctcatcggtcacctctcttacgcaaaatcgccttcagaaatgttcacgtcgctcatggcatcatccacaccggcgacccatcgcagatgcagctcctcgaacggcccattctgccgatattgcagcacaccttgtttgaagaacaccagcacggccatgaaccgggcaaccacctcgatacgggatgcgcaatcctgggtcagctcgctaaatgacatcgattgactaccagattccagagccttgcgcaatcggtcacgcaccaccacggattgcgcccgcaaatcgaccaacggcacatgcagttggtgaaccgacacctcggaggccggtgcattggcgatcacctgtgcggcgagtttcgccagttccgcgggcgtgagcgtccacacgagctcgggcagcatggcctgtatgccctcatccatataagccgggtgggggaaccgtccggaattggcggcaaatcgcgcgcggaaatcgccggctgcctgcttgtaggcgcggtactgaatcaggcgagcgaacagcagatcgcgttcgcgcagtgcctcgagactctgctcgtcatgctgattctcctcgccaccgggcaagatggccacgcttttggcctccaccagaatcgaagcaacatccaggaacgcactggcctcgtccatgttcttcgtgaagtcaaggccacgcacataagccaggaattcctcggtgatcgaggagagcgaaacctcggtcagctcgagcttgttgttggcgatcatgccgagcaacgcatcgaacggcccggaatagacctcaagattcacctggaagccggagcctatggcggcctcgacttcctcctgctggcttacgagagtttcgctcatcaggccacaatgccgcgagacacgagctcgcgggccacctcgcggtattccttggcggtcttatgcccaggggcatagataacgatgggggccgcagccacactggagtcaggcaacttgatggatcgggagatgaacgtgtggaacaccttgttctcgaacgcctcatagatacgctggcatacttcctcgcagtggagggtgttggtgtacatggtcaccagcacgccgtagacctccaacgcgggattgatgcgggactggaccttctcgatggactgcatgagcagagccacgccacgaagggcaaagaattcggcggccaccggaatgatcacgccatcggctgcggccagggcgttcaccgtgagcaggccaagcgaaggctggcaatccacgatgatgacatcgtattcggccttgagcttgcgcagcacaccgttgagaatctgttctcggcccacctcggtgaccagctggacttcggccgccgacaagtcaatgtttgcaggaatcacatcgatgttgtcgaacgcggtgtgctgcaccacatcatggggatccacagacatatcgaacaatgcggtgtaaatggtgctctccacggtattcgcattgatgcccaagcccacggtggcggcaccttgcggatcaaagtcgacgataagcactcggcggccatactgtgccaaagctccggcgatgttaatggaactcgtggtcttgcccacaccgcccttctggttgcacatggcaatgactcgagccggaccgtgctgctgcaacggttcgggagccgggaaggtttcgtattcacgtccaagaaaatcggtaggcatatcgtctaccttatcaatatccgtgttccgagatggtgcagcgacatacgtttcgtccatcggcaacgtaccttggcggaatgtgctgctgccgcgacgatctgccatgcctgaaccttccatcaaactctgatttctcccgactagcctactcttatccgttcgctgccaccgttaccacatcgcgccacaccagtatgccgaaacaatccgtctcatcgccgctaacgcgctctgggatgcgcggtgagatacgtttcgatcagagcctcgggactcacgtgcgtatatatctgcgtggtggtgacgctggcatggcccagcagttcctgtacggtgcgcacgtccgcaccgccctgaatcagatgagtggcgaacgaatgccgcagcgtatgcggatgcagcggcttggtgatgtcggcccgctcccccgctgttttgacgatttcccataccgattggcgtgagatgcgtttgcctcgcttgttcaggaacagcgctcgacgctcagggactttggccgttgatctgcgttccagctcgcctcgacccgcgttgagatacgccacgactgagttacgggcataactgcccaacggcaccagacgttgcttggatcccttgcccatcaatcggacgaccttctcctcaaggtcgatgtcttccagattcgtgcccacggcctccgagacgcggcatccggtggcgtacatgaattcgagaagggccttgtcccgcaacaccaccgggtcggtggaaccgccgacggctgcggcatccagcagccgggacacctcgtcaacgctcaacacgtccggcaacacactggcccctttgggggctttgaccgaagcggccacatccgccgataccgcatgctgggccaaggcaaaacggtgaaattcgtggatggaggccaatcggcgggccttggatcgcgcggattccccgtccgcatcaagtgcggcgatatagtcctcgacattctgtttggctatatcatccggcttggtgatgccatgggtctgaagccaggcgacatatttattgaggtcggattcataggcggagacggtggctttggcgagtccccgttcgatgccgatatgcacgaggaactgctcccgcagtgtgccgaatccgtcaatgcccataacggctcatattacgccatcgttctgtgccggcctcaacgccgtccgagacgtatcagacgtccgacgttttccgccgcgcgaatgagattccttggcccatcggcaatggcctcgttcaatggcatggcaccgggaacaatgccgaacaccgcatcgatgcccacgtcatagagttggtcgatgccttcgcccacatgtccggcaaaagcgaccacaccgatatgcggattacgctctcgcaccgccttggccactcccatcggcgttttgccgaatttcgtctgaaagtcaatgccgccttcgccggtgaagcagtagtcggcgccttcggcgcgctcgacaagacggaccgtggaagagacgatatccacgccggcacgcatcgtggactgggtgaaggcgagcagtcccgcgccaagaccgcctgcgccgccggctccgggcgtatgggccacatcgatgcccagttgatccttgatcaccgccgcataatgggcaagattattgtcgagttgggtgaccatctgcggtgtcgcgcccttctgcggaccgaataccgccgaggctccggtcggccccacaagtggattagtcacatcggaggcgatcagtatgcgcgtgtgcgcgatacgtggatcgacgcccgacacatccacggtgacaagccggtcaaggaatccgccaccacgaggaatgggatcgccatgcgcgtctagaaaacgcactcccagagcttcggccatgccggctccgccatcattggtcgccgacccacccacgccgaggataatcgtgcgggccccgtcatccagagcatgcatcataagttggccggttccgtatgtggtggtgacaagcgggttccgggtgctttcggtaacgaactggatgccgctggcagccgccatctcgatcaccgcggttttgtcctcatctcccgtgttgccaaggatgccatactccgccgtcgtctcgaactgcaacggattcagcacctttgcgctgcgcatatgaccttgggtggcgtccaccaaggaacgaaccgtgccttcaccgccgtcggccatgggcaccatcacatattcggcgtccgggaacacccgcagcagtcccgcgcgaatggcctcaccggcctgttttgccgtcatgcaccccttgaaggaatccggcgcgatcacaaatttcatagcgaatccttaccgccacatatgcgagaaccccgcacaatggcggggttcttaccagatgtcgatagactcaggcctcaaccggagcgttgacgtcctcaggcagagcagccttggcggcgtccacgatggtcttgaaggtgtccgggtcggagacggcgagctcggcgagagcgcgacggtccagctcgatgccggcaagacgcaggccctggatgaagcggttgtaggtgatgccctcagcgcggacagcagcgttgatgcgctggatccacagcttgcggaagtcacccttgcgagccttacggtcgcggaagttgtagttaaaggagtgcagcagctgttccttagccttgcggtacaggcgggagcgctggccgcggtagccggaagccctctcgagaacaacgcgacgcttcttgtgggcattcactgcgcgcttgacacgtgccataatctattcctcagctttctaaagtcttgtttgttcctgtaagccctaagctcacttctgcagcagctggtgcagcttcttggcctgaccaccgcgcagcacggcatcggcggacagagcgcgacgcttgcgagcggacttgtgctcgaggttgtggcgcatggcggaaccggcctgcatcaccttgccggagccggtgatacgagcgcgcttggaagcggcggaattagttttcatcttcggcattgctgccctccttgctggtttgcttcttgtcggaagtcttctgagaaatcgcggtcttcgcatcggccgcggcctgagcctgcgactcctgcttggccgccaggcgagccgcctgacgagcctgacgctcggcgcgggactcggcgccacgacggcgctgctcggactgggtatgcaccttcttgcccttcggcgcaagggtcatgatgatgttgcgaccctcctgcttcggcttggactcaacggtgccgaattcctcgacatcgtcggccagacgctgcagcagttccacaccaccgatcgggcgggagatctcacgaccgcgcaacatgatggtgactttaaccttgtcgcctccgttgaggaagcgggtcacatggcccttcttcacgtcgaaatcgtggtcgtcgatcttcaggcggaaacgaatctccttgatttccgcggtgctctggttacgacgagcttcacgagccttgatcttctcgttgtacttgaacttgccgtaatcgatgagcttggcgaccggaggcttcgcgttcggggccacctcgacgagatcgaggtttgcctccttggccaggttcagcgcgacggtggtcgcgatgacgcccacctgctcgcccttcgggccgatcaggcgtacctgcgggacgcgaatctcgtcgttaatgcgtggttcgtcgctgatgatgactccaatcctctgcttcaattccttgggcagggctccttgatgaaatgcaatcaacgctcgatggttcatggcaagccggaacatacgcattcacgcacatgcacgcagacatatcgtcattcctgattgtgctcattcatctggcacaatcgctaggctgtttgccttgaacccgaggccttgaaaagcttccaggtgggggtgccccgctttcttgatttctcaagccaaatggaaagtctaccatatgcccggacattgacgggccgtgtgtcgggttccctactgcacggcgcgcagcaggccgccaataccctcatctttcagaatctgacgatacgggccggcttcctcggcgatgatttgatcaatggcatgcatgcccagcacttcgaccggcgctttgtcgtctgtgagaatggtcgacgatgagtccggttcgctcgtaagtggtctcacgcaggttgagtgccttggaggcctgctgcatggagttctcttcggagccggaacccggcttcttggcgaacagttcgcggttcgtggtattcggcacgtcggccgtcagcatgttcccattgccgaattttcttccccgcaggccgcgcaacggctacagtagtcggatatgagtaaggtatgcgtgattttcggagccggagaatactatgccggaactcccgtggtgccggatggcgcgtatgtggtagcggccgatggcggactggatcatacacgcgagctgggcatcgtccccgatgtgatggtgggcgatttcgactcattggaaggacgcccgccccgcaccgacgtacgcacgattacgctgccctcgctgaaggatgacccggacatgctctccgccttgaaagtcggctgggcagcgggctgccgcgaattccatgtctatggaggtctgggcggacgcattgaccatacgatttccggcattcagctcatgaccttgctggctgggcacggggcaagcggatatctgtatggcgacggactgatagtcacagcaatcacggatggcaagctctccttccccgcgcacccggtacccgaggacggacgaatggtgtcggcgttctcccactccgatgtttcacttggcgtgaacgaaccaggattgaaatacgaactcaaagacagcacgctgaccaacacgatggtgcaaggcgtcagcaatgagttccgcgacggcatagatgccgccatcagcgtggaacatggtaccttgatcgtcaccttccccatcgaagtggcattgccgcaggtaagccgtttccatgaattcagtggcggcatcggcaagctggacactgaagtgtccaagttgttggttcgctgaccggacgtgagccccagcttccgtggattcacgccgtcggtccaatacgggaaaccgcatatcggttgccggcgatccacaatgtgagcgctcacaaaaaatacgacgtttttgctcaaaacgcacgctcagacattgccatgtgtacagagtcggcattacagtagcaactgttggtaaacaatggcccggtgtgccagagcgcaccacgggcaccctacaagggagaattacatgacagttaagattggtatcaacggcttcggtcgcattggtcgtctcgccttccgtcgcattttcgagctgcaggctcgcggcggccaggctggtgacatcgaggttgccgccatcaacgatctgaccaccccggctactctggcttacctgctgaagtacgacagcacccacggcaccttccgtcatgacgacggcaccccggttgacgtcaaggccaccgaggactccatcatcgtcgacggcaaggaatacaaggtctacgccgagaaggacgccaacaacatcccgtgggtcaagaacgacggtgtcgagtacgtgctcgagtgcaccggcttctacacctccgccgagaagtcccaggctcacatcaacgctggcgccaagaaggtcctgatctccgccccggccaaggatgacaccaccccgaccgtcgtgttcggcgtgaaccacgacatcctcaaggcttccgacgtgatcgtctccgccggctcctgcaccaccaactccatggccgccatggtcaagctgctggacgagaagttcggcatcaaggccggcttcatgaccaccatccacgcctacaccggcacccagatgctgctcgatggcccgcgtggcaccaagaccggccgcaacctgcgcgccgccgccatcaacaccatcgcccactccaccggcgccgccaaggccatcggcaaggtcgttccgtccgtgaacggcaagctgcagggccacgcccagcgcgtccaggttccggacggctccgtcaccgagctgaccaccgtcctgaacaaggagaccaccgccgacgagatcaacgccgccttcaaggccgccttctccgacaccgactactacggctacaacgatgagggcatcgtttcctccgacatcctcggcgacacccacggtggcgtgttcgacccgacccagaccgacgtcaacaccattgacggcgtgaccctggctcgcaccgtgtccttctacgacaacgagtacggcttcacctccaacatgatccgtaccctgctgtacttcgctgagatctccgagtgaaccactgcggtctaggccgctacggttcgtttgagaactaagctgtgagacccccgccttgtgcgggggtctcttcgtagtagaacggtaatcatggcaaagaagaagcacgataaaggcgcaggatccactccggcgaccgtccagctggaaaaagcgggcgtcgaattccacgtctatgaatatgagcattccaacgatcacatggacgatggctacggcgtggaagcggccaccaagctcggtttcgacgaacaccaggtgttcaagacgcttatggcggacaccggctcggagcgtgtggtgggcgtggtgccggtcagcgggcatatggatttgaaggctctggccgcggcagcgggtgccaagaaggcctcgatggccgaccccaaagtggctatgcgcgaatccggctatgtggtcggcggcatttcgcctttgggccagaagacgcatcataaaaccgtattagacgaaagcgcattgcaattcgaccagattctggtctccggcggcaagcgcggcctgtccgtaggcgtcaatccgcaggacctgctcaaggtgttggacgccgtcgccgcgccaatcggcacgtggtgactttgtcttggctcccctcgcagaggggagccaaggatgactatttcttccggcgcagctcggcaggcagcacgaagtgcatgttttccttgatggtttccaccgatttcatgccggtgaaaccctgattgcgtaaagtatcaatcacaccggaaaccaactcatccggcacggaggcgcccgaggaaatgcccacggattccacgccctcaaaccatgacggatcaagctcgctggcatcatccacgcggtaggccttgcctcgctcgcccaagccctcctgagccacttccatcagacgtacggagttcgaagagttggccgatccgacaatcaccacacaatcggactgctgggccaccaacttcaccgccgcctgacgattcgacgtagcatagcaaatatcagagctcggaggctcctcaatccacggaaaacgagccttcaacgcagcaatggtgccggccgtttcatccacgctcaatgtcgtctgcgaaagcaacaccaacttggtgtcgggtgcaaaatccagcgaatcgacatccgattcatgctcaatcagatgcacatgctcggggctctcccccactacgccaaccgcctcatcgtgccctttatgcccgatgtagacaatctcatacccctcgcgcacaaaacgcaacacttcacgatgcaccttgcctaccagcgggcaagtagcgtccaccacgtgcataccacggcgctgagcctccgacttcaccaccggagatacgccatgagcggaaaacaccaccggaatgccagccgcagcggccgcatccggaatctcgctcaactcttggacgaataccgcaccctggcctgccaaatcctcgaccacatgcttgttatgcacgatttgcctacgcacatacaccggtggcagaccatcctcacggtggagcttcccagacgattccgcagccttaagaatcgtttgcacggtgagaatcgcacgatccacaccagcgcaaaacccgcgcgggtcggcgagcaccacacttttggtcatcggaacctcctgaatgtcaacactgttctccagtgtaaagcagggactacaggaggttactgccaacctcctgtgccggagcccgtgctccgccatcttttcaaagaatccccgcgtttttcgcgtacgatgtgacactcgccacgttcaccacccgcaatgctctttcctgatacacgtgccgactccatagccgccgccaatcccgcttcgacagcggaaacgcgctagactgaggccagcgatagcaggagctaccgaaccatccatcctcactacgggagtgattccatgacgagcaaaacgccacgcaccggcaaccagtattcgattcaccacggcgactactccgctgtgatttgcgagctaggcgcgaaaatccgccggttcgacttcaacggcaaggaaatcttctgtccattcggggtcaacgatctgaccccgacctgcaacggatacgtgctggccccttggccaaaccgtattgaaaacggtgaatacgatttcaatggcaagcactactgcgctccggtcaacgaatatcacccggctccgcgcaacaacgcgaaccatggatacgcctaccactacatgtggaagctcgaatcgctcaccgacagcgccgtgacgctttcactgcgcttccccaacctggacggatacccgttcgatgtgaccgtgaccgtgacctacgaattgggcgaaaatggcatgaccgtgaccatcaatgcccgcaatgatggcgacgatccggcaccttgggctcttggcctgcacccgtggcttgccaacggcgagcagggcgcgacttccgccgaacgcgatgccgactccgccgcctgccatctgcagatcaaggccgccagtcatgtgacggtgaacgaggcgctgattcccaccggcactgaacctgttgccggcatctacgatctgaacgatggtccgacgctcgaaggccgcgctttcgatgacgcctgggttgatgtggagcgcgccgccgatggcacgaccactaccacgttcacccgtcctgatggtatcgaagtgaagctgatcggcgacgaaaccatcaatgcctggcaatgctacaccgccacgggagctccatttgccgagcatccgtacggcatcgccgtcgaaccgatgaccgccccggccaacgccttccgcaccggcaaccatctggtgacactcgcacccgatagtgattacaccactgtggtgcgttatgaagtagcccagaagtaatccagaaatagccctatgaattggctctcctcattgaggagagccaattttgttatctatatacgccgcgtcccaacgctgatgcggtacgattgcgagcggtaacaataccctttcacaaaggagtgtgcactatggctttgaagcctcgcaccggtaaccaatacgccatctcatccggcgaatggagtgccgttgtcactgagctgggcgccagcttgcgcgaactgaaatggcgcggcgaagacatcatcgtccccttcgacccggacaaggtgattccctgctgcaacggatgtgtgctggcaccgtacccgaaccgcgtgaccaacggtcagtactccttcgacggtgaagactatcagatgccgatcgacgaatttgaccgtcaatcctccctgcacggctatgcctaccgttatatgtgggagcttgaggacctgcaggaatcgcatgtgacgctctcatggcgctcccccgacatcgccggatatccgttcgacatcaccatcaccgccacctacgcgttggacgagaacggccttacggagaccttcaccgtgcacaacaacgacgccgtgaaggcaccgtgggcgttcggcattcacccgtggcttgccaacggcaagcatgccactggcccggccatcaccgccgacaacgagccatgccgcctcgagctgcactgcgacactcacgtgactgttgacgagcatctgctgcccactggcgaagagccggtctccggcatcttcgatctgcgcagcaaccccacccttgaggggcgcggcttcgatgacgcctggaccgacatcaccaaccgcagtgctgacggcagcacctctgccgtattcacccgccccgatggcatcaaggtcactctgaccggcgacaagaccatcaattcctggcaggtctgcaccggcaacgagattagtgagaaagtccgtcagcccggtgtggccgtcgaaccgatgactgcctacgccgatgcattccgtaccggcaaggatctggtcgtgctcgaaccaggcgctgattacaccactgtggtcacgttccaggccgagcagctctgaaccaatcagccgaatgtgcgccacatggacgcgcggtttgagaacgtcgcgctcatgtggcataattccgaaggcttaattttttactgcagcaaaggagtccatcatgggcatgcgcggacgtaagcgcaaggatcgtcgtaagaaggccgccaatcacggcaagcgtccaaacgcctgattcttcgcgtttgatataaacgcaaaaggcccgtctgagcaatcagacgggccttttcatatatatctctcacatcatttgtcctcgccgcagcaatggtcgagcgtggctttcagacgggccatgaggcattcaggagccacatccggccgcaagtaggcgcgcattgcggcaatcagagcctgttcacgcgcatcgcaacacgtgctggggtcaaaacagtcgccctcggccacgatatgcacgtccgccgacgccgttccggcctcatcatcacgatgatgtactgcagtaatgtgcacttccgtctggctgaccgtgccatcggacgaagtacgggttatggagatgtgacgggtatgctctgtcggctggtcgttcatcgcatctcatttccctgaggcttacgagactgtcgaagcatgcgagcgcgtgctaccgtatccgtgatggtttgcgcggcgtcatcgctgtcaacagtatgttcactagttccattatggacgtgtcccacggtttgaccaacgttttcgcccaacttcgctgatggtgaatcggtaatgtatccgcgatccttggcatatgaggcaagttcccgtttcagttgagtacgtgcacggttcaaccggctcatcaccgtgcctattttcaccccttgctcgtcagccacctgctgataggacttgccgtcgatggcggcatcgatgaacacttgccgacgttctggagacaatttggcgagcgcagccataatctcttccggagcaaaggcatccagatattcctgttcggcagatttcaacccatctgaagtatgttcagaagcatcgtagatgtcccagtcatcatattcgccggtcgaatcgttggcgcgttgcggacgtcgtttggccttggcgtactggttgaaatacgcgtttcgttcgatggtcgtcatccatgcctcgaaattcgatccaggctggaaggaatcaaacgccttgaacccgcgctcgaacgtatcctgcaccagatcctgcgcatcgtcggggttgttggtcagcctcatggcctgacgatagagcgtgttgacggcgggcatggcgagctgctcgaaacgagcgcgcttagccgccatggattccccggcttcggccggcatcccggtatgcactgttgcttcgcttgtcgtcacaattctccattctagccaaatcttgtgcccatatcgtggctgatgacatgtgagccacgccacggcatgaccgccctgtagaatggctaatcggctaggaatagggagaaaaagatttatggctttgactttggctgcggccgccgaattgctcgaccgacatcatctgctccgcgaaatcatccaaggcgattgctggaccgacgatgcagcgaatcttgccgacgctgacaagccgttcactgccattacctatgacacgcgcaaggtcgttcccggcacgctcctgtgctgcaagggtcggttcaaggctgaatacctgaccgatatcgacaccaccggactcgccgcgtatgtggcggaaaccgaatactccgccgtcacccgcacccctggtctaatcgtcaatgacgcacgcaaggccatgagtctgctctccgctgagttctatggccgcccgcaggataagttgaccgtgatcggcatcaccggcaccaagggcaagaccaccaccgcatattttgttcaagctgtgctcaacgctttttccgacggtaagaccgcgctgttctcgtcggtcgataattgcctggatggtcgcacctatgtggaatcggacctaaccactcccgagtcgatggatgccttccgtatgatgcgcgaggcggtcgacaatggcatgcggtatctggtgatggaggtttcctcccaggcatacaaagtggagcgcgtctatggtctgacctttgatgccggcgcgttcctcaatatctcccccgatcacatcagcccgatcgagcatcccacattcgaggattatctgtattgcaagcggcagatcacacacaattgccgcacactggtgctcggcgccgactgcgatcatgccgatttgattcggcaggatgctcaagcctcgaatgtaccggtcaccacttttgcgctgcatgctgcggacgggcacggcacgcatgccgatttcgtcgcgctgccggatgcatcctcaggctacctgttccaggagcagggcaaggctattggcgatttctcgctggaactggaaggcgagttcaatgccgccaacgccgctgccgccattgctttggcacgtgcagtcggcgtaccagctggctcagaggctttccgcgctctggaacgtgtgcatattcccgggcgtatggaacattatgaatccggcaatatggtggcgtacgtagattatgcgcacaactatgtgagcacgaagaccctggccgagttcgtgacacataaatacgcggatcgcaatccgcgtgtcgtcgtggtcactggctccgtgggagataaagccgtggaccgccgtgaaggcatcatcaagggtgcgcaggattatgcggatcgcattattctgactgcggaagacacagtgcacgagcgcatgatcgatattcttcatgagatgcagggttatatcaccaatcctcgagtcgtctcggatatcgagctcgatcgtgcgaaggccatcgaaaaagcagtcgaggatgcgcacgcccatgcggacaggctgaccattctgctggtcatcggcaagggcgaagaacgttggatcaaggtcgatggcaagcacgcgccttacgagggcgatgaccatgtggtcaagcgactgttcggactgttgaacgactgatcagccagccatctgaacccgcaatcggaataagaaaagcaagaggataaggagcaatcattgattacgctggaacacgtcacgttgccggccatggaacaggccgcggcagaggcaggcatcgtactgccgattgagcagacggaagcctggggccgctatcaggccaaggtgccgggacgccacccgtggggcgcgtaccttatccgccgcgatggtgagttggtggcggtcatctccctgattgattacgagacccacggctaccactacctgcgttcgctgcatggtccggtgtggaagaccaagcccacccaggatgaggagcacgaggtaatggacgcactggtcaaggccgtgcgctcccacgaccgcaaggtggcgttcctgcgcgtggatacatggttcgatgaaggctactaccgtgtgctgtccacggtgccgtatgaccagaccgtgatcgttgatctgaccggcggcgacgacaagattcttgagcgtatggtggcgcgtggccgtcagaacgtgcgcaaggccctgcgcgaaagcccggccacctgcgccgacgaaaccgaacaggcttccaagtcgttcgacgagtattacggcgtgatggtcgacaccggcaagcgcgacggctttgcccctgctccgaagcaggactacgaggatatgattcaggagcttggccctgagcactgccgcctgttcgtcagccgtatcgacggcaaagtggtcaactggtgcctgattaccttgaacgacaatcgcgccgtctattactacggttgcatgagcaccgctgtacgccgtctgcgcgtgccggacaagatgttctatcacatcttctgcacgctgggcgcgcagggcgtggaaagccttgacatgatgggcatcggctctgacttcgcaccgtccttgaagggactgaaccagttcaagaccaagttcgcccgggagattactccggtggcggcaggccatgacattccggtcaagcgcggtttctacagcctgctgcgcttcattcagaagctgcgtaagggctcaaacgcggacaagcactaagctcacttcccctgatgacaagctatcgtcatccagaaaacattcagcacagctccagcttctgtgggcagattctaatcgttctgccacgtgagcgtcgcacaataaccaatggttatcaatacatcgacgcatagaggctggagttatgcttactgtcgccagaacgacatttcgtgatattgaaaaagaagccgctggttgcgatatcacgctgcccattgaagactatctcgacatgattggcgcattgggcgcggaacactgccgcgtattcgccgcgcgcatcgatggacaagggtggtctggtccatcgttacggtggaaggctcgtatgcggtgcgttattatgccgccatgtgcgacgccgccatgcgtattcatgtgaccgatcgactgctgtacgccgaatgctgcatgctgggctcgcagggtatcaccgattacgatttgatgggtatcggctctgacttcgcgccatcgctcaagggtctgaacgcattcaagaccaagttcaccgagacgatcacaccggtggtcccggcccgtgacgtgccgctcaagaaggtcttctacaagacattgcaggtcgtgcaaggtgtgcgccgagcgttccgccaataaacccgggagcggcttatttgtccagcttctggctcactacagcggtgacgccatcggctcgcatcgtcacgccgtacagcgcatcggcgattgacatcgtgcgctgctgatgcgtgatgatgatgagctgggcatgggcacgcaactcgttgaacgcgtcgatgagacgggtcaggttcacgtcgtccagcgcggcctcgacctcatccatcacatagaacgggcttgggcgcgcggtgaaaatcgcgaacaacagagccaatgcggtcagcgagcgctcgccaccggagagcaggctcagctgtttgacgcgcttgcctgccgggctggcctcgaccagcacgcccgtggtgagcagatcctctggattctccagacgcaaccgtcctgtgccacccgggaatagtgtggcgaacatcttctcaaaagcttcggcggtatcgtcaaacgcggacttgaacacctcgaccatggtggagtcaagatccttgatgagctgcatgagatcatcacgagacttgaccacatcgttgcgctggtcgttgaggtacttgttgcgttcctccagcgcctcgaactcctcggtggccagcggattgatcttgccaagcgcagccaagtcgcgacgggccttgtcgagtcgcttctgctgttcctggcggttgtatggcacggtttggaagcggctggggtctgtaccgctgtctgctgcggcgtcgggggcatcggttgccgcatcgtcggcattgccgtcgctctcgccatccgtatgttccagtgacacaggattgccatcatcgtcaagtaccggaaccggctgatcagggccatactcacgtaccagttcctccagggtgagaccgagctcatcggacactttctgcatgagctgaccggcttcggcggccagacgctcacgattcacgtccaaggcgtgttcgcggcctgtcagatcggtgaccttcggctcaatctcattgcgctgggcgcgcagggttttgagctcatcgtcatgactggacgccgcctcctgtagcttgtcccgctcagcggcgacgccctgcagcgtgtgttccaccatggcggccacctcgcgtgcatcatcagccacgccttgcaaatgggcggcctgatcacgccgacgctcgttcaacgattcgatacgggcgcgacgttcaacggcttccttggcattatcgcgcaacagcccggcctgtcgggtcagggactcccccttgcgactggcttcagtccatgcaatcttcgcggcgacctcatgctcacgggtcaggttcaagtcacgttccagtgtgcgctcgcgttcgtcaagctcatcgaaatcggcatgctcgtcagtggattgctgcgccgattccaaagcgcggttgagatcatcgagcttcagctgatgttcgttacgattctcttgcgtgtccgcgattttcttgtccaactgttcaagctgacgcgcgaacgacgcaaccctatcctcggcggatttcagcgacttttccgcttgctgagccttgagtcggacttccgtgcgcttggcggattcctgatcgaccagacgggcggcctcgtcacgcttggatttggcctcgctcacctgcccagccaattcattggcctcgacaccaagctgcttgacttgggccagcgccttgtccctgcgggcggcaagcgacaggtcggactgggaaatcgatgatccgccgactgcggccacaccgtgggcaaaggtctcgccatgcttggtgacggcgcgtggggcctttccggaagcgacgagacgctgcgcttcatcagccgtctcggctgcggccacgtcggtcagcagcagctgcacggtgcgcacgcaggccgcggcctgtattttatccgaggcctcgggattagccgtcacgaggttcgccaagcatatatcggtatcggcaagagcggcgaatggttcgtcggccggcattgcggtcagcaccacggctttgccgagcttgtcttcacgggcacgctcgagggcatgaagcatattgccggttcccggcaccacgatggcactggcatattggtcaagcgcgtgggccacggcttcttcccaaccatcagccacatggataaagtcggtgagacgcccgagggatgccacctgctcgtcccgttccagcgatccggaggcgttgcggctgtccaacgtgtcggacagtgcatcggctttggcctgcaacgagatgatcttggactgtatgtcacgctgacgatcggtcagctcattcaacgcatcgcgacgctctgccagggcggcacgggccttgtctaatgcggcaccgtcatcatcggccacggattgcgcctcactgcgcagcgattccaactgatgctgcgcatcatcatgctgcttggcgagcgtctcccgctgcccggtatgatccttggcgcggctgtccgccagttgtacggcggattcctctcgggctatcaattcacgcagactggcgatatgggcgtcacgctcttgcgcggttttacggagctcggtcaaggtctgacggatggaagcgagcttcttttcatcgtcggcgcgctcttcggtggccttatcaagtgcgatgcgggcgtccgccacggctttgatctgcgctgcagcctgagtttccaactctttggctcgcttgagcaacatgtccgggtcttctccgaaattactgacgatctggccggtgagcgaacgtccgcgttcctcagccaactgggcaagcgcatgcaaacgctcccggatctgggaaaattcatgccaatactgattggtcttggcaatggccgggctggattcggaactcaacgcctcgacttgttcgatgcgcaccttgacctgggcaagctcgcgttgggcaacggacagctgactgcgcacatcgccgagttccttgcgcaccgtctcgcggcgagccatcgaacgctgggcatcctcggcatagatacgagcctgggcgtcacgtacggaaacctgaatggcatcggcccggcgagaaatgcgcgcctgacggcccaacgggccaagctgcctgtgaatctctcgcagtaagtcatcgagtcggttgagatttgactccgtattagccagcttgcgcagggcgcgttccttgcgcttgcgatgcttgaggattcccgccgcctcctcgataaacgcacggtggccggacgggtcggccttaagaatcgcatccagacggccctgccccacgatgacgtgcatctgctggcccaagccagtatccgaaagcaattcctgaatatcaagtaggcggcactgagaaccgttgatggcgtattcggacccaccgttgcggaagatagtgcgggagatagtgacttccgtgtaatcgatgtcaagcgtgtgatcggaattgtcgatggtcagacttacctgcgcgcggcccagtggagggcgggaggaggtgccggcaaaaatcacgtcctccatcgacgtacccctcaggttcttggctccctgctcacccatcacccaagtcagcgcgtcgacgatattcgatttgcctgaaccattgggacccacaaccgccgtgatgccaggctcaaaacgcagcgcggtggcggaggcaaaggacttgaatccgcggagggtgagttccttgagatacataacttgaccgtttttcgttgatgggtgttacggactactgtatgtcaggcgtccgagcccgcactggagtcctggtcagatgaaccgtcgacattgttgttcttcgccgcatcgccgaggccgagcacgtcaaatacgtcgaaatcatcggggctgacgttatcctcgagcgtatcggcgccaggctgatcctcgtaatcatctgtggcatcatcggaatcgaccgccggctgatggatggccatagcctgctgcatcgtggggctggcatgctcggcaagcatggtacgtgcgtcaccggcggtcacgaagctgccgcaaacgagcacgccatggccatagccgacacccagctcatcttccgcatcgaccatattgacggctgtctgaatcgcgtcgggaagattcggctccttgatgacacgatcacggccgaacacctcgacggcgatcttctccagctcatcggccggcatcacgcgctcacgccaggaattctcagtgaccaccacggagctgagaatcggctccagcacaccgagatactcctcgacctgcttgtctcgcatcatggcgaccacaccgaccagctgcttgaagtcgtagctttcctcgatggccttacgcagggcttcggcggcgttgacattatggccgccgtccaaaatgatggtcggcgaggtacgaatctgctcgatgcggcccggaatcttcaccgagcccagcgcctctgccaccagatcgccgtccagtggcccgttgaccggaatcaccacttcggcggcggcgagcgcggcgagcgcgttatgcgcctgatgctcgccgaacttggcaatcggcacgccctcatacgtgccattgggcgtggtgagagtggccacctggccgccgaccgcggccatgcgatcggacacggtcatctcatagccgtcacgcaccaacgtggcatggttgcgttcggcggcctcctcaagaatcggcatgaccgcttcctcgtgcggctgacgcccgatgatggcggtgcaattcggcttgatgatgccagccttctcgcctgcgatctgctcgacggtgtctcccaaccattgcatgtgatccatgtcgacagggccgatgaccgcggcatccgcgttcaacacattggtggcgtcccacatgccgcccatgccgacctcgacaacggccacgtccacgggagcgtcggcgaatttccagatggccatggcggtgagcacttcgaagaagctcatcttcggcttgccctgttcctccattttggcgtccaccaaggccacgaggtccttggtctggtcccatacgtcgatgaaatcgtcatcggaaagctgctggccgtcgatggcgatacgctcgttgaccttctccagatgcggcgaggtgtacaggccggtacgcatgccgtacgcacggcagatggcttcggccatgcgcgcggtggagcccttgccgttggtgccggtcacatgaatcacacggaacgactgctccgggtggcccaaaatatcgagcatcagattcatccggtcaagatccagattggtggtgttgtgctccggcggacggctcatgatatccagttcgacgtcccgcatgctctcgttgttccgattcggatgctcgaatgacatgtactcttctgacctctgcgctcaattgatgctcatattgatccgtacgttcccattatgcgttcgtacgaatttatgcgtgtccgtatgagctcgtatgtgtccacacgagttcgtacatatccgcatgtgttgctttgtgtaactcggttgcgcgcgacctttcttcatgccttcgcatgcgcaaaaccgcactctcccaagctcctccatcttagccgccggggtagtttatcgtgcgcgctcagtgaaaccgcctcgcatattgtgtctggaaaactgaaatagtccgttcacatacaccgatgtcatggaatgcaatcttttgcgcatcaagctgttcaaggccggaatcccgaaaacggatgccgacggataatccggatatacagggacgagcagattgcaatagacggttgcgcccatagtatggcccatgcccacaagtctgtccacattccgcgccgagttccgcttccattccacaatcatgccaggaatgcatatgtccgactagtatgaggttggaaatcgatgattcgataacaactacatacaggagagtggcaatgggtgaagtgatcaccgccaaggacaaggaatatgaggccgaagagcgcaagagcgcgcccggcgacaaccagtcgatgagtgaccgcgtgaacaatcgatcgctgcgtccgcaatcgcccgcattcaaggatttcatgaagtccggctgggccgacgacgacccggaaatcaagccgctcgaatcctccaagtacattcccgcccgccttgaggcgctaggcaaggcattccccggcgagcgtctggtcattccggccggccagccgaaggtacgcaacaatgattgcgattacgccttccgcccggacaccaccttcgcctattacacgggcctaggctccgactacgaagccggtgccgtgctggtgctgaacccggtcgaccctgactcccccgaagccggagccggtaagacccatacgccggaactgttcgtggctccgcgcgcagataactccaccgaggacttcttcatgtccgcacactatggcgagtactgggtgggaccgcgcgcaggcctcaaggaaatgcagtcgatgaccggcatcgaaacccatgacatcgcccagctggccgactcgctcggcaaggatgtcggagccgaggccggagccgttcgtgtacgcgtggtcagcgaaaccgacccgcaggtcacctcgatggtcgaatccattcgtgaggcaaacggcttcgccgacccggacaagaattctgccgccgatgacaagctgcacgagttcgccgccgaggcccgtatggtcaaggacgactacgagatcaacgagatgcgcaaggccgtggatgccaccaagcatggctttgatcgtctgctctcctccttgccgtccgcgctcgacaagccgcgttccgagcgcatcctcgaaggtgcgttcaacgccgtctcccgcgagctgggcaacgccgtcggctacgactccatcgtggcttccggcccccacgccccgatcctgcactggatgcgcaacaccggcgtggtgaagaacggcgatatgctgctcgtggacgccggcgtcgaggtcgattccctgtacacggccgacatcacccgtaccttcccgaccaatggcaagttcaccgacttccagaagcgcctgtatcaggcagtgctggactcgcaacaggccggcttcgaggctgccaagccgggtgccacctactctgacatccatcacgcctgcatgcgcgtgatcgccgagcgtctgcacgactggggtctgctgccggtgagcgttgaggagtcgctctccccgcaaggacagcagcaccgtcgttggctcgcctgtggtgtggctcaccatctgggtcttgatgtgcatgactgcgcacaggctcgattcgagtcctatcagggagccccgattcgcccgggcatgattttcaccatcgagcccggtctgtacttccgcgaggatgatttgctgattccgccggaatatcgcggcatcggcatccgcatcgaggatgacgtgctcatgaccgagaacggccccgaatggatttccgccggcatcccgaagcaaatcgatgatgtcgagcagtggatggccgatcaggcgaagtgacccattctggctcccctctgtgaggggagccaattattgtgaaaagggaggcaacatgcctactccagaattcgtgttggaacttcgcaagaaaatcggccatgatctgctttggctgatcggtgtgaccggctgcgtgctcaacgaccagggccaactattgctgggccgccgttccgacaccggtgaatgggcgatggtctacggcatcaatgagccaggtgagcagccggctgacaccgtggttcgtgagatcaaagaagagaccggagtcgatgccatcgtcaccgatctggtggccgtcacttcgtccaacaaggtaatcacatacgccaatggcgacaacaccatgtacatggatcattcgttcctgtgcgcgttgaaaccgggaggcaatgccgaaccgtttgttggcgatgaggaaagcctcaacgtgggctggttcgacctgaatgacctgccctctcccctggcggcaagcaccgcggaacggctcagcctgttccaccagtatttggagaacaaaaagcatggtgacgctcatgccctcttccaatttgaagggcagcagcactagcaaaagctcgctatagcatgaatgtggggagctccggtatcacaccggaagctccccacattgttaatcggtcaggaacgaagccttgccattgcagctatttcaacttgcgccccgcacaccaaacctgttcgaccgtccagtcggcgggattgataagattgaagtcggcggcaaaaccgggcgcaatcaggccgattgaagcaccggtcacctcatttggccgatcaaaaccaaaggcctttgccggcgtcaacgtcgcggcttcgaccgcgtcgacggcactgatgccgagctcgttgaccgcacgacgcacagccacctccagcaataatgtggagccggcaatggcgccgttggacaccagacgagcatgaccatcgaccacattcacgtccagcgcaccgagtttgtatgcgccatccgggcaatcggtggcggccatggcatcggtgacaaaggcagtacgatgcggcgcgaaacggaacgaaagcttcaccatgggattctgcacgtggaaaccatcgttgatcagctcgatggtcacgcgaggatcctccactgcggccggaatcgggcccggctcacgatggtgcaggccgttcatcgcgttgaacatgtgcgtcatgatgccggcccctgcatcaaaaccagccttggcagtctcgtagtcggcatcacaatgccccaccgcaggcaccacgccggcggcgcggaactggcggatggcggaaatgccatgcggcaattcaggggcaatggttatctgccggatgcagcccagcttgccattgacagcacctgaggcctccagcatctcatccacgatttcaggaaccggatccttgagacattccgggtcatgagcacccttgcgggccaaggccaggaaaggcccctccagatggcatcccaaaatatcggggcgtccggcttccattttggcgcgcacattgcggatattgccgcagatgacgtccacgggattggtaatcagcgacagcacctgacgagtcgtgccatgcacggcatgcccggcacgagccacatcgatgccatccggaccgtcatcgaagctcttctcccatgcgccgtgtgagtgaatgtccacatagccaggagtcaggattcgcccttcggcatccaccactgcattacggtcagcggggtcgatgcccaccgtgccgcaatactgttcgaaagcctcatcgcccacaccggatgccacgatggcgccggatgcgttggacacgacccaatacccactctgttcgccgcgcgcatccaccttgcgggcattgcgaatggccaccggagccggtgcgccttccaatgccgccgtcacacgggagacaatttcttccctatcagacatatgcaattcctccacgtggttggccccccttgagaggggagccaaccaataactcagatgccctgccaggccggcttgtgggtgtatgcgtagcggtagtagtccttgtgacgcaggcggctcgcagcctcctcgtccacgataatcgtggcgtgcggatgcatctgcagcgcggaggccgggcagaatgcggagacgccgccttcgacggtctcctcgatggcctcggccttgccggcgccgaaggcaagcagcaccagatggcgggccttcataatcgtgccgatgccctgcgtaatgcagtgggtcggcacctggttgatgtcgttgtcaaagaagcgcgcgttatccacacgggtctgctccgccagagtcttgacgcgagtaccggaagccagcgaagagcccggctcgttgaagcccacatggccgtccgtgccaatacccagaatctgcacgtcgatgccgcccgcggcctcgatggcgcgatcgtaggcagggccggcaagcgccaccttgtcgccatcctcaagcggcgcgccattgagcacgtcaccgggcacgtggaccttggacggatccaagccaagaggctccaccacggtacggtggatggtggcatggtaggactcgggatgggtcagcggcagcccgatatattcatcgagcgcgtagccactcacctgggagatgtcgatcgactcgtcatgcacgatcttggcaagcgcctgataggctgccagcgggctggagccagtggccaggcccagcactgcgttcggcttggctttgatgagatcggccacgcaacggccataaatctcgcctgcttcggcttcgttcttgacaatgatgatttccggcataggtatcttcctccgttcatgaggcccgctagacacgggcttctgcccaaagccgcccatcatggttcatggcaacttctttgtcactttccacaatgtgcaatccgattatgtcgatgttcgcatcaacctaaccagttatttgttaatgctacttacaattatggacgtacggacactcggcgttcccaaaccagaacaatcgagtacactggaatgtattagtgaagtttcataacagattcaacgccgaacggaatctcacataccgtgtggttatgtagacatacagccgccacggcacatgcgcagtcatcgttcaggcaggaggaatgtatgtcgtatcccggtcttgccaccgcgacggatgaccgtaccgccaaagcctcccccgccgatgtacgccgcaaaaaccgtcagctcattttcgccctgctgtttcccaccaaacagtattcacgcgccgaacttggccgccgcaccggactgagccgcgtggccgtgtctgatgtggtcggccagatgctcgaagaaggcctattgcgcgaaaccggccaggcgcccagcggcggcaagggcaaacgaggcacgctgctgagcatagacaccaaccggctgcgcataatcagcattgatttgacgcaggagcatctgcttcacggcacggtcaccaatctgttgggacaaccgctgcgccacgccgaagtcaccttgaataccggagcatatgtttccgtggacatcatcatcgaactcatcgagaagatgctcggcatgtccgacggcgaggtcatcggcatcggcgtgtcctcccccggtgtggtcgatggcggcgtagtgcgatcctccacgatgcgcggatggcgcaatctcgatttggccacacccatcaacgagcatttcggcatcgacaccaccgtcagcaatgacgccactagtgccatgctcactgaacgcttcttcggccagggcgggccgaatatgctgttcgtgcggatggacagcggcctcggttcggcgattctgttgagcgacaccccagtcatcggcgaactgcatgcggcgggcgaaatcggccacatctccatcgacttgaatggtccactatgcccatgcggcaaacgtggatgcctggagaccatgatttccgccgatgcgctgagaaaacagatggccaacgtcgacgatgacgagcggcaggcaatactcgctcgcgccggacggcacctcggccaggccttggccatgcccgtgggcctgttggatatgtccgacgtctgcatattcgggcaaccggacatcatcaacacgaccttcatcgacgccgcccaggcctatctcgacgccagcacgtcatcgtccttccacaagcacaccgtgatcaggcgctgcgaatgcgggccggacatcaccgtgcagggagaagccatcgccgtgctgctccagtatctggccaaatagtcagatagccagcaccgggtggcagcactatgcggccatagccgctccgatggcccccaccggctgccccgccggggccagacgaagccgagccggcaaatccagcgactccaaaaagcggcactgcgattctcgacgacgcagctcagcggtaattacctcaaccaacggttcgccggttttggccataccgccacccaacacgatcaatcggggatcgaccgactgagccagaatctggatggtgtcgccaatggccctcaccaccatatccagcacatccacggccttcgcctcacgtctgctggcgcagcgaatcaagtcgggcatcggcggatcggcgttcggccatagcctacctaccgcagcccccgagcacacggtttccagacacccatactggccgcaggggcacttcaaacgatgcggctcaaccggaatatgaccgatttcgcctgcggccccactgtatccatgcagcagcaccccgttctgcacgatgcccgcagccagtccggtaccgaaattcaggaacgcgatggtgccgtccaagccatccgcacctcccagcagcactgcagcacccactgcggcagcgttgacatcgttttccacatgcaccggcacgcctgccagtttggagacttcggggcccatatccaacgaaaccacatcaagattcacgatgttgcccacgtgtccggtggcggagtcgaccgtgcccggcgtgccgatgccgattgccgagacctcgtcaaagcgggttcccgcggcctgccgcgcgaccgatacaatgtcctcgaccaccgcagcattaccatgacgcgcagggattctggcggagttcagcaccgcgcccgttgcatcgacaagcgccgcctcgattttggtgccacctacatcaacaccaatcctgaaattgttcacggtgttatcagtcattgcctatcccccgttcttcgtcgaacaatatgcttggaatcagtatgcatttatgtattgacaactatcttaacaaattacagaaagccatgcgtctcatacgcgacacgccgaaacataagttgattgcatgaatagattaactgcgttaatatcttaatcaagttcagattcaaagacgagcggacgctacccaagcaacgacgcaggacaaaggagaatgatatggcagacgatactgcacgcgccacttctcaggccagcgtttccgaatccaaccgctcccgcatcgtcaagcatctctaccacaacggcatcagctcccgcgcacaaatcgccaaggccttggaactcacgccggccgccatcaccaagatcaccgcacggcttatcgaagccggcataattgaagagaccggcgacctggaaggttccaagaaccgccgttccatcgggctgaaaattgacaccgctcgcttccgcgtcattggtgtcaagttcgcccgttccctcgtgcaaatcggcgtgttcgacctgtgcggcaatgcgctcagcatcgaaaacctgcccccggtgtacgaccgcaccatcagcgacaccatcacggccatccaccaacgcatcagcgagctgcttgatgacgatccgtccatcgtggccatcggcatggccgtccccggcccttacctgcgcaacgtcggccgcaccgctgtggtctccagcatgcaaagctggcgcaaaatcaacttcatcaacgaattttccaccgcgttccgagtgcccgtcttcatcgagcaggatgcccgcgccggcgcgctggcccactacctgttcgaccccgcattccacaccaacgattacctcgcctactatctggtcggcgaaggcgtgggacttggcgtcatcgacaatggccacctcgtcaacggcgcgcaaggcgcagccaccgaaatcggccatatctccgttgatgtcaacggcaagccctgcgactgcggcaacgtcggctgcctggaacgttactgctccgccccggccatccatgacatgcttatcgaggacggctcggttatcccggacgcctcagacatgacccatgccgaagccgcccgagccctgttcgccaaagccaacgaaggcaacgccgcggcccagtccatggtttgcgaagtggcgcggtatatcggctacggctgcatcaccatcttcaacgctttcaatcccgaacacatcatcatcggcgatatcgtatccgaggctggccctctcctgctggacacggttcgcgccacggtggccgaacgagccatccccgaaatcaacgatttcacctccataacactctccaccctgccgattgactccaccgtctgtggagcggcggctgtggcggtcacccagtttttggaacacccctcggtgttcttcgacgtttcctgaccgaagcgccgaccagagatttccatacgaaatcagtaatcagagaaaccataaggaaaggaaccaaccatgactaccccgatcgttctgagccttggcgaactgctgtgggatatgctgccgggcggcaagcgagcaggcggcgcccctgtcaacttcgcctaccacgcgatgaagaacggcaccgaaggctgggctatcagcgcggtcggtgaggatgagctcggcgacgagctgatcgccaaagccgacgaagccggcatcaacaccgttatccagcgcaacgcttggccgacttccaccgtcgaagtcgccctgaagaacggtatcccggagtacaccatcgtcaagggcgtggcctgggatcacattctgtacacccgccagctcatcgatgtggtctccaaggccgacgccgtctgcttcggcaccctggccctgcgctcccccgaatcgcacgccaccatcaccgagctgctcaagcacaccaagccggatgctatgaagttcttcgacatcaacctgcgcggcgaccactactccaaggatctcatcgaggagctgctcaaggccgccaccgtcttcaagatcaacgatgaagagctcctgctgctgcgtgacatgttcgacattcgcggcacctccggcgaggatgcctcccgctggttcctggacgagttcgatctcgattacgtgattctgaccgccggctccgcctactccaccatcatgtcccgcaagggcgaggtctccactctggacaccccgcatgtcgaggtggtcgacaccgtgggcgccggcgactccttctccggcacgttcaccgctcgcactctgctcggcgactcgcttgccgacgctcaccgcaaggccgtcaacaccgccgccttcgtgtgcactcaggccggtgcttggccggaatatccggctgagatgcctgactacctcgttgccgcaggcaagtaagccttcggcaacaccggtcaataggccatactttccagcctttttcgactcatgctcacgctgggacaatgatgttccggcactcgccagaccctgtctcccggcgtgagccatgcccaaaaacaggtgattgataactgaatatcgattagcaattcattgtctcattgcagtaaagaaaaagggaattcaaaatgagcaacgaaaccaccaagaccggcaacgccggcctcgtaaaaatcgcgcctgtgttgttcgcgtcttcgtcatgggcttcgtcgatctggtcggcaccgccacgaactacgtcaaggctgagttcgatctggccaacggcaccgcaaacctgttcaccaccatggtgttcttctggttcctgatcttcgccgtgcccaccggcatgttgatgaacaaaatcagccgccgcaagaccgtgctatggtccattctcgtaacactggtcgccatggcactgcccatcatcgtctacgtggcactatccggcaccgcacgcctggtgctgatcgtcatctccttcgccttcctcggtatcggcaacaccttgatgcaggtatcgctgaacccactgctcaccgtgttcgtcaagggagacaggctcgcctccacgctgacgctcggccagttcgtcaaggccttcgcatccctcttcgccccatacatcgccatctagggcgccaccaagctcggcatgtggtggatcctgtttgtgatctacctggtcgtcggcatcaacgccccggctccgcgtatcctcaccgagcacaccggcgacaccttcaccgaaatcgccgccaccgccaccatggtctacttcatcgcccgtatgatcggctgattcaccggcggtatcgtgctctcgaagatctccaaccacgtcggcattctggtgtgcggcatcatcatgaccgcctccgccgtgtgcttcaccatcttctgctccatcacctccaacccgccggtcgccttgttctgggtggctgtggctctggtcggcttcggtaactccaacatgttctcgctgttcctctcccacgcgctgatgtaccgtccggagcaccagaacgagattcccggtctgatgctcatgggcctgatcggcggcgccatcttcccgcccatcatgggtgccctggctgatgccatgaacgcccagctcggcgccatcatcgtgatggccgttggctgcctgtacgtgctggtcatcggcgttggctacaaggccatcatcgaaggcaagaaggccgctcaggtcgaggcctgataatttggcccgctttagcggggtttgcctcaacagataaacgacaagccctgtacgaatcacgctcatggttcgtacagggcttttgcatgtgcacctggcacttggctcagtgcacgccacctggcatatcgatttcggtatcgatgatgatggtcaccggcccatcattgaccaagccaacccgcatatgcgcgccgaacctaccttctttgaccggcactcccccggagcgtagcgcctcattgaacttgatccatgtaatatcggcgtgctccggcttgcccgccttgatgaagctcgggcggttgcctttgtgcacatcggcaaacaatgtgaactgcgagatggagagaatctcaccaccgatgtcctgaatcgagcggttcattttgccctgctcatcttcgaatacccgcagattgaggatcttgtgagtcaaccacgcaatctgctggtcaccatcctcatcggtcacacccaccagaatcatgaatcccggaccaatctgctggggctcaaatgtagggtccaatgtgcccaactcattgatcacgtccacggatgcttcagatactcgttgcactacaactctcatgactccctacagtagcaacaaaaaagcgccgttcccttacggaaacgacgcttgtcttggtggagtcgcggggaatcgaaccccggtccgatgaccgagcccacagtcttctacgtgcgtagtctgctggccaagttggcggtttttctgcccccatcgctgtcgcagacaactgatggcgagcatatccgcagtaaaagtcccgatggagccctgaggctcaactccatcagcaagtcttcttaacgacgctcagcatcctcccaaagacgaagaggagtgaacggagcggctgctcactggttaatcctgactaaaaatcaggcagcgagagcgaactcagtgcggttagatttagcacttattcttttgccggggtcatccacgagcggacccggcgttctcggcacgcttccctgcagcgaacaggtcaccgtcgaaaccgatcgaccccaatcttgaattatcaagcttccagcctttcggccggacgtttcaccatacacctgtatctatgcatttgcaaatcagctcacagcagaccacgaacaagcccgctcacgtcagtcagcccaaacgaccaggaacatcacttcatgataggtttcaacggcgcggatacatcgacctgatgacggtcgccaatcacattggagtcattgataatcttatcgaccactgccattttcagcttgagctgagaggaatcgccccacacgatcacacggtcgccgtcattgagtgtggtggtcacggaatcctgcgtttccgcagtgacctgggtgattgccgaacgcattgattccggtagcgcacccagaatggtcagggcttccttgatcgaacgattcttcaggctcttatcgacatccttgacttcaataacgggaatgccgtccacattcgcgtccgtcaccgaattcaatacgcgagcctgtgaatcgaccgcagtcaacgtatccccgtttttcagcatggcggcgggccgttgcgctttgacctcaacgctcatcgatttcgggaattgcttggagacgttggcctcactcacgccgggaatatccccgagctgtttggacacgtcgttcgtggataccaaaaacagcgatttacccgcctgcttatcggcaatggagcgaatggtctgctcactgacccattcgttggctccagatacactgatcgcacccacttccaggcggaacaccgaagagaagaacagcaaccataccagcccaatcagcaccgccacactggttaccatggctaccactcgcagcgcgatgacgcgcatgcccgcacgcttgcgctccttggctcgttcggtgaaatccaccactttcggacgggaaatcactcccagcgtaccggtggtctgatgcagcgtctcagcaacataatcctcactatgcagctcgcgcgcgtctacaaacgcaccttcctgcccgatggcacgcgtcacttcctgaggccgagactcgtccacaattcccggacgggaggccacggaacgggctttacgcgactttccagccttgcccggacctcgctggtgcgattccaccgaacggggtttgcgacgctctcctttcgcgccgccagaactgacggtacgacctgccattactcacaactttcgcgatgggcctcgagcgcggtaagcagcacctgatccatatcagtgatgtcgccggcgcccacggtaaagatcacatccccatggtgggctcgcatggccatcatcctggcggcaagacccatgtcttcaaccggttgaatccactcgccggcagccgcatccttgatgccggcagcagcatccacgatggtggccgcggtaatctccgggaagtcctcctgcttctcacgggcagggaaaatgccggtgacgatgacatcatcggccttggccagcgcctcggcgaattcgcgcgcaaagaacttggtacgggagaacagatgaggttggaaaatcacgcgaatggtcgactgcggataacggcgccgtgctgcatccagcagagccgcgatctccgtagggtggtgcgcgtaatcgtccaccaccgtgacctgcttaacggttccgtacacctgaaaacggcgtgcagctcccaggaacgtaccgacagcctgtgcggcgtcggtgggagagactcccaacagcaccgcggcggtgattgccgcggcggcattacgcgcattatggatgccgggaaccttgagttccacacgctgggccacagcatctgcagaggtcaccgcggcgggaaggtgcaaggtaagccgttcaacgccggtgccggcggtctcctgttcagaggaaatccacacatgcgcggcaccccctaaatcaggcagctgctcaatgggcgtggtgccatagacgacggtatgggccttgatgtcggcaggcagcgcctggaacacggccagcgcgtccggatcatcagcgcagatcaccacatggccggttgcatggccggcatgattcacgaatgcggcacggtaatgcgcttcatcgccgtaatggtcaagatggtcggcctcggcattggtaatgatggcgatggtggggtggtatttggcgaagctgccgtcggactcatcggcctcagccaccaacacgtcaccttgaccggcatggccaccgtccaaggtggtaccgtccggcccttggatggaaccgccgatggcatagctgggatcagctccggtatgcaccaaaatgtgcgcaagcatggaactggtagtggttttgccgtgcgcaccggccacggtcacggctcgcttgccgttcatcagtaaagcgagaatatcgctgcgatgcacgatgtgcaggccaacctcgttcgcggcaacgatttccggattgctgggcttgatggcactggaatagacaacggtcgaagccgaagccacattttccgcccgttgcccgaattcaacggtgatacccaatgattccagtcggtcagtttttgcactacgctcacggtcggagccgtccaccggcacgccctcggcgttcagcatctcggccaggacgctcataccggcacccccgataccgatgaaatgcgtagggccaagatctgcgggacgggccgcggcatcgaacgaagcatgggtagggtcaagcacaatgggctgattctgggacaattgacgctccttgagggatttccagcacctctattatggctgtaccccgtgccaacgcaacgaggtatggccgattctgatcaaacgtgaatttaccggttcctattgagcaagctgcagaacacggcgcgccatgatgcgcgcggcatcacgtatgccgtattcccatgctttgcgtccgagctcggcgagcatttcgtggtcggcaagcatgcccggcacatgatcatgcacccatgccggcgtcaggtccttatccgctaccagcagaccgccaccagcgttcaccaccggctccgcattaaagcgctgttcgccgttgccaatgggcagaggcacataaatggccggcaatcccagcgccgccagctccgataccgaaccggctccagcacggcatatcaccagatcggcgcaggcaaaggccaagtcaatccgctccagatattcagccacgtgataatcgccttgacctgccgaatcggggccgattccagtaagcacatcagccttcaccgacttgctgaccatactgcgcacctcatcgcttttgccacgtccggtcagatgaatgatctgagcatgggccagcagatcagcggcggacgaggcaatggctcgattcaggctctgcgcgcccagggaacctccggtgaccacaaccacaggacggtttggatcgatgccgagctcagcggccgattcctttctcacaccctcgcggtcgacttccagtcgctgggaaagcgcggcaatggccggacgcaacggcagaccgacacgctcgagttcagcgccttttctgggtttcagaccggtttcgtcatacaccgtaccgatgaagtcggcccatcgcgctcccaacttgttggccatgccggcacgcgcattttgctcgtgcatggcgatgggaatgcccatcttatgcgccgtggcatacacgggggccgatgcataaccgccaaagccagcgaccacgtcggcatgcctgctctccaaaatggtgcgcactttggccgtttcgcgcttccacttggccgggaattgcagcaaatacgcattggggcggcgtgggaacggcactttctcgatggtgtcgagttcgtatcccgcttgaggcaccaaatctttttccaggccgaccgcagtgccgataacagtgacctgcgccgcgggttcaagttcgcgaatcgccccggcgacggcgagtaatggattgacatgtccagcggttccgccgccggcaagaacgatatgaggtgctccttgggtcatgactaccgagtgtactctacacgctctggcgagactgcttaatctgcggttggcatcgcataagtcccacaactagtcctgcggccgccaaacacatcaccattgaggagccgcctgccgacacgaatggcataggcacgccaagcaccgggaacactcctacgaccacgccgatattgaccatggcctgtcccacaatccagatggtcacacacatcagcaccattgatacgtaccgatcagcgacctgcagcgcaacgacgatcatgcaccatcccagaatcgcgaagaacaggagcacgatggcacatcccacgaagccggtttcctctccgatgatagcgaagatgaaatcgttatgcgccgccggaagataattccacttctcacgcgaattgccaatgcccacaccaaggaagccacccgaagcaatggcgtacttcgcatgcatggactgatagcacaccgtctgtgcgtcggccgcagaacaatccccgtacgtggcgagaatacgccgcatacggttcgggctggaaatcgccagcaccgccaccatcgccgccatcaccagcacgcctatgcccatccatttgcccggaaaacccgcaatcaggaaagccacaatgccgatgaaaatcagaatcatggcagtgccaagatccttaccgccaataacggtcaacaatccgaccgcagaaacgccaagaggaactgtataggctttcatgccttgtttgcgatagagctttttggcggccctcagcgcggtgggaagccacacgcacagcgcgaatttcatgaactcggccggctgtatggtggtgaatcccagattcaaccatcctcggttaccgtacacgtcaatacccaacggtgtgaaggtcaacgcctgtacgagtatcgagcagagcatcagcggcagaccgatgcgtttccagaacccgaccggcatcaccatggcaaaaaatcccacaatcaggccaaggatgcagaacactccctgattgagcaattgaacaaatggcgatctgccttgcgccgccatggtgaccgtggaactggagaacaccatgatcaggccaaagcaggtcagtcccaccaccgccatgcggaaaccgttatagcaccacagcggattgagcaggcttcgccagccggtgtaatcggtaatgaccagagccggcttatttgcgttcccgtgcgctttgcgaaccgaagaattatcggagaccatgcacctcgctccacgccttggctgcggctgcaaaacgattgcctcgatcggcataagacacgaattgatccatggacgcgcacgcaggcgccatcagcaccacgtctccggctgccgcatagtctccgcaggcagccaccgcacgatccatcaccgtatcgttgtcctgcggatcgatgacggtcaccggaatgtccggtgcttggctgcggaaggcttcaatcatcggctgctgatctttgccgataatgacggcggccttaatggtatgagcctgattgctgaccaaatcctcaaaacggctgcccttggccaagcctccggcaatccagaccacggacttggccgagaagctggacaacgaagcgttggcggcatggccattggtggccttggaatcatccacgaatcgaataacgccgccgttcacacgtgcttcggccacggtttcgatacgatgcccacccggtttgaatgtctgcaacgcctcaagagcggtttcccggtcggcgccaaggcccaaaaccaacaccagcgcggtcagggcgtcggcaaccaggtgtgggtacaacgagccatccggctccatcaaatgggtgaaatcggcgatggcggcgagcttgacaggctcccccactttgccgccggcaacgccgctgcgatccacaatccagccgtccgcgatgccaatctggccggcttcaggctcgttcaacgtaaatcctactttgcggcatcctgcggcaacgggtgcggcttgagccagttcgctgactttggtgtcctgcgcgttataggcgatgacgcgccgggcggcgcggaataccttggatttatcggccgcgtagttctcgcgcccgccatgccagtcaagatgatcgtcggcgatattggtgatggctgcacagtcaagttccaaggaatcggtgaaatgcagctggaaggagctcaactccacgcagagcacatcatgcttggggttagtggcgcagcgggacaggctcatgctcatgtctccagaggcaatgttgccggcggtgggtgcatccagaccacacgcggtaagcatctccgaggtcatttcggtggtggaggtcttgccgttggttccagtgatgccgatccaaggcgcaggcttgccggtcctcgcattatccgcgcgcagacaccacgcaaattccacctcgctcatcacgggaataccacgacgctgcgcttcgagaatgaacggagtacgcggattgaacaccggcgaggccatcacataatcgacctgatcccaatccacctcgtcgaaggaatgcaaatcagcatcgctttttcgttcatctacaccaatgacatgggcgccgcgctcccgcagcacctcggccaacgaagtgccggacactcccagtccggcaatcaccactgtcttatccgctacttgcatgattcctcccaaatttaggaataccgtgggcgagcttaagcccttcagatttccgctagctgaacagcagtccggatcgggtgacccagtcaccgtagaaaatggtcagggcgagcagcacgaagatgagttcaatcatccagaaacgcactaccaccttggtctccgtccagccttcaagttcaaaatgatggtgaatcggcgccatcttgaatacacgcttatgcgtcattttgaagtatcccacttgaatgacgtcgctcatggcctccatgacgtataggccgccgaggatcacagtcaggaactcggtgtgcgtggcaatggacagagccgcgaacaggccgccaagtgccagggaaccggtatcgcccatgaagatggacgcagggttcgagttgtaccacaggaagccgaagcacgccaccgcagcgcaaatcgcgatgatggccagatccagcggatcggacacggcataggaatagccgccatgatcgccacccttgatgtggtagctttcccaaaacgcgatgacggcgaatcccacgaaggagatcatcgacgatccggcggccagcccgtccagaccgtcggtgaggttcactgcgttggtccatgcggtcatcaggaagttcacccagataacgaacaggatgatggccaccgcacggcccgcaaaatcaaagctgaaaaacggctgttcaatgaagctcataccaggctgtgcgctggggaacccggatttggtggggataatcagcgccagcaccgcatagatagtggaaagaatgaattggccgatgaacttaccgcccaccgtcaggccttcattctgcttcttgcggactttggcaaaatcatcgatgaatcccaacacgcccatggacagcatggcgaacagcaccagcaccgcagaccatgagggcacatcacccgatcgcaggtatcgatacaacgccgaggcgccccatcccagcacaatcgcaaaattgataaccacaccgccaagcgtgggggtaccgcgcttgaccagatgcgattgaggaccgtcctgacggatgtactggccatagtgcagcttgtgcaccagacgtatcagcaacggcgtgccgaccaaggtgacaatcagcgacaccagcattccaataatcagagcaatcacgtgtggcttctctcctcttgtcggtcttcttgtcggttcagcgtcaggcccaccgctcagccaatgcgctgagtccggaggcgtgcgagcccttgagcagtaccacggtatccgtatgattcttggccaagtcaaggactatgcgctcggcctcatcaatggtctgcacacagtctaccgaagccgcacgcccacgtgttgcgccttcggccaaagattcggccaacacgttcagatgcgcgtctgagggcgatccgaccgtgatgatggcatccagtcccagaccggccgcatattcgccgaccgaagcgtgcaattcacgctcatccgcaccaagctcgagcatcgcgcccagcaatgccacacggaatggctggcgaccatcattcgcattccatgctcgcaggccgtccaatccggctttcatggaatccgggttcgcgttgaaggaatcatcaatcagctcgaacgaagctccttgacggctcaccgtggatagagccatacgatgcgggctgatggtgtgctgcgcggccaacgtctgtgcaatagcagtcagcggcatgccatatcgcaatgcgacggttgccgcggcaagcgcgttcatcacattatgacggcctggaatacccagatgtacggtaacctgctcgccgtgcgcgtcggtcatggtgaattcggcgtgatcagcggcatctgcagcaatatgatcggcatgcacctcggagtcacgggtgtgcccctgaccaaaccacagtacgtcgccggaagccagctgtgccatgggcacgacgtaatcgtcatcggcattcagcacggcggtgccgccgggcagcagcccctgcacgatctcgcttttcgcctgggcaatgcgctccctggaaccgaattcgccgagatgcgcgactccgaccctgagcacaataaccgtattcggcggtgcgatacgggtcagccgcgcgatctcaccgatatggttggcgcccatttccgctacgaaaaaacgggtgtcggcattgactcgcaatgcggtcaacggcaagccgatctcattattgaaagaaccgatcggtgccacggtgggacccaacgtgctcagcagcgcggagagcaaatctttggtggtggttttgcccaccgaaccggtcaatccgatcaggtcaaaggcaccgggcagctggcgccgacgatcgatattatgcttggccagcaatcccaatgctgcgacggtgtcttcgaccacgatctgcggcatcgttgtgcacgctacttcatggtcgacgatggcggccgccgccccctgggcagcaaccttatccacgaagtcatggccatcgacccgctcgcccttaatggccacgaacactgctccggagccagcctgacgagaatcagtcaccgtttcggtggcttcaatggcgggaccgtcgcctgctaccaaccgaccgtcaacggccttggcgatttcctccacgctcatcgggaccatggtgtcttgaactccttcagtgtgtcgtatattgctgtattgtattgcatccgctgcacgtcatctgagattattggccactcgcagagcactacgcacgttgttcctgcgcacgcctgccgcgagcaccatggcaacagcaagagacatatggccgagcctatcctggtcaaacatggcgggcgattcggccgccagttcgtcagactccccagtaggtacggtcagagccagggcacggtcggacacaaacgcatatcgggtttttaaggaggccacatcctccccttgcgcgactcgctcggagcccagcacgtccacgttcactgattccaacgcttcacgttgcagtgtggcgttattcatcgcgatgataacggcggcaacgccgtcctccgcgcagaccgcgagggtgcgctgcacatcgaggatgcccaacggatacgaaaggttcaaagaacgcgtcatcgacgtggaaccagtggaatcgatcacggcaacggggttgcccagcatgtgcaggaaatcggcaagatgcttcacaccggcatggatgatgtcatcatcatcgccggccacggcaaataccgccatagcattggatggggttcctgccagagaactggccaaatcaccgagcatatggttgccgcaatcgccgaacaccagcgggatgccagactggatatcccggccacggcacgttctgggcagcagagccgcataggcaccggattgctcggcacggggcagatcggcaagatgattgctgtcgcagatatacatcgcgccaggcgaaatggtgtctacagcatcgctgagcgatgtgatggtgacattggacgcaaattccggatcaatatcgaagccataccgctcggccagcatgcccaaagtcattcgctgggcgatggattcgctcactgcgctcatgggtcaacgcctttcttttcgatatatcaccaagtgaccggaatagcatctttacgcggcgtcgagataggcacctcgtatttctgcataaggaacgcacaaatctgcgcggataccgggcctgcggtcaggccaccgaaaccagtcgggtccttgagcaccacagtcacgacgaaacgcggattgtcggcgggaatggccaccgagtaatcggagatgatggaggacagcttgccatcggcgccctgcacctcggcggtaccggacttcgcggccatgcggtagccatcaaccttgacgaaggcgctgtagctatccgaaacggactccatggcatccatcatctgagcggccacctgctcatcgaccacgcgagtggccttgctcttgttttcggtgttgccgtcatccgacttgatgatggactgctgctgcttcactcccttattggcaatggtggccacgatgttgctcagctgcaaggcattgaccgtgtatccctgaccgaacagcacggtgttgcgagttcgcgcatcccatgccgagggagaggtcagcacgccactggactcgccaggcagagccaatcccgtggactgtccgatgccgaacttggtcaggtattcgtaccgctgctcatccgtgtagccatcgccggccatgaccatgccgatattcgatgatttctggagaatgccagccagagtccaatgctcatcaccatgctcgaaggcgtccttataggtctggccatccacagtgagctggcctggcacggtgtactgatccgtcggtttgcgcaacccggtctgcaaataaccggacatggaaataaccttgccgatcgagcccggttcaaaggtctgggacacggctcgcgaaacgttcatcttcgcttcgtcactgccggccgctatctcatcgctgtccgccagagccagtatttcgccattctgcacgttctgcaccacggcgataccccactgggcgctgtactgggctgtcgcttccttcatgatcttcttggcataccactgcacatcacgatcaatggtcagcgtaacgtctttgccgtccttggcggccacggcttcggtcatggtgccgggaatctcttcgccaccgtagttgccacgctggtaaatctggtgtccatcggtgccggtgagcgttttgttctccatttgctcgaatccggccacgcccacgcctttgtcgttgactccgccgagcagcgatcccatcagttctccatcagggtacaggcgttcgctgctgagttcgccccagacgatgccgccaaggttcaaatcgtcgatggtgcgcttgacctgtggcgtgacatccttcttcagcacgacgtattggccgctgatcgacagatccgcgcccagctccatcgcattcatgtcaagagccttggccagcagacggcccactgcggcagcgcccgtggcacccaccggcttgccgtcgatctcgtcgcagtagtctttggtcttctcgttgcaatcggtgggaacgaattcctgggcagcctcggggttggccacaatggtatagcgttccacgctctgggcgagcacagtgccgttggtgtcaaggatgcgtccgcgcttggcgctgagcgtcacgcgcgaagtacggctggccgtcgcggcctgcgcggtttgacgtccgccaatcaattgggtggaggccagctgggcaaggcacattgttgccacgatgcccaatgccacgcccacggcgatgcatttgaaggcaaaggtcttcaccttgtacaagtgaacgatacgtgcgatggtggctttcactgtgctccactttctccggactgctggtatccgttcaaatcaatagtcaccgatccgccttgcgacaccatgcccatttcatcggccttatccggcagcgatgcgaccaactggtcaagcttggcctgatcgtcttcgatgtcctgggtcagcgtgctgatatgctgcttgacttctgccgccttaaacgagttctgcaccatttgggtgcgcagtaccagcgcgccgagcaacgtggccatgaggaacacgatggcaatcaccacatgcatcagcggggcgctgcgtgtacgggtccattcaataacccgttcaatcatgtttccttctgcttgaacccgctgaccggaaatcaccttcagttcagggcgcgaaggagcctgaggcctggactgcggcctggactgcgttgaagcactggatcgaatgctgcgtgccgttgctgccatggtcagcccctccttccgtgtttgccattgttacgtgtggtgttcgattcctttgggtttgccgctgtttgcgcgaagcgttctcgccacctctcaggaatccgtctgctcagctcgaccgccctgagccgcactgaagcggatcgcgggttgcgttgccgctcctcatcatcggccttgattgcacctcgggtcagttcccggaagaacggctgggcatcatccggcacgattggcaggtttgccggcgcatcaatcttcaggccctgtgccataaaggatttgactgtcttgtcttccaacgagtggtaggactccaccaccaaacggcctccgacctgaagacgattcgcggcctgaggcagagtggatgacagtttgtccaactcgccgttgacttcaatgcgcagcgcttggaacacacgctttgccggattgccggccggacggtgagctttgggcaccacatcttcgactagagcgttgagctggccggttgtggtaaatggcgtctgcgtgcggcgcgacacgatctcacgcgcgatctgacgagcgaaccgctcctcaccatattcccggaagacgcgaatcagcgatgccatatcgtaatcagcgagaatccgctcggccgtgagattctggctcacgtccatgcgcatatccaacggggcatcatgggagtacgagaatccacgatccgtttcatcaatctgcaaactcgacagacccaaatccatgaacacggcatccactcgttccacgccctgatcggcaagcacctgatcaagctgatcaaaggccgcatgaaccggcgtgaatcggtcggaaagcccctcctgaaccatacgctcagtcgccaaggccaacgcctcactatcacggtcaataccgataagacgagcttgcggcgccgctttcaggaaagcggtggaatgaccggcaagacccagcgtgcagtccacggccacggcaccttcgtgttgtaatgccggcgccacaagattcacacagtcatcaagcagcactggctggtggatattcgtcacatcaatcatcagaactccacctcaggcagtacatcatcggcgatatcggagtatccctcttccttttgtgcgaggtaggactcccatgcatccttgttccacagttcggcgcgcgtacccacaccgatcaccacaatgtcggacccgagattggcgtagtcacgcagcatttgcggcaccacaactcgcccctgcttgtcgggttcctgatcgactgcgccagacaggaacacacgcaagtattcgcgggcggctttgttgcccaccgaagtgcgctgaatctgggaggcaatacgacgaaattcgtcaaacggcaacaggtacacacaacgttcctggcctcgggccattaccagcccctggccaagctgggaacgaaatttcgcgggaagtgccacacgacccttggcatcgattttcggcgtgtacgtgcccagcagcagcggaggcaggccggccatgaggccgtcgattccggcggagccttgctgatcagcatcggtttcacgcgagtgcttgctctcgaccatggctccacctcctttgtactcgccgggtatacttcagccaaccgattcaccactttaccccaccattcaccatttttccccactacaacacgttttactcaccttttttggaaaaaccgtcacgattgcacacggccgcgaagcggaactcaccgaccatcgcaaaacgcaaaaaagccgtcaccgatttggaaacgcatcgcgcgcggcgtgggcaggcacatcaccagagcagccgcaccactgcccttccccgacgtagggggtgtgcggtaaatttgaatgccttaaagtttgtgaccattacgagcggagacgaagagaagcatgtcgagttacgcctcacagctgcacgaggagcagcaggccgtcgatcgcgcctatggacgtctggatgacctgcgcgccgaaatgtggcagcgactgagcaccgtacgagcagccggttcgcacggctcccccacccaacgcaccgagcgcgattcttttgccaccatgtacgaagatcgcctcactcagctgcgcagcgtggaagaccggctcgtgttcggacgacttgactcgcaagacggcactcgtcattacatcggtcgcatcggtctgtcgagcaccgaccatgaacccattctgaccgattggcgagccgaagcggcccgccccttctatgaggcgacgccctccaaccatggcgacatcgtgatgcgccgccatatcacgttgagtttccgcgaagtggtaggcgtcgaagacgaagtactggacgtgcattctgaccaagtgggccaagcctccactgccggcaccctgaccggcgaaggtgcactgctcgcttcgctcagctcgcgtcgcacgggcaaaatgaccgacatcgtggccaccatccaagccgagcaggaccgcattatccgctctgacatgaaccgtgccgtggtggtacagggcggcccaggcaccggcaaaaccgctgtggccttgcaccgtgccgcttacttgctctacacgcatcgacgcacactggaacgttccggcgtactggtggtgggccccagctccgcgttcctgcattacatcgatcaggtgcttccctcgttgggcgagaccggtgtcgtctcccgtacaatcagtgacctgattccgggaatcaccgcatcggcaaccgacactccgcaagccgccaaactcaagggcgaccgtcgcatggcacaggtgatcgccaacgccatcgcctcccgcatccgtgtgcccggcaatctgccgaccgtcaccatcagcggcattcagataccgatgcttgccgtcgatatcgaacaggcgcagtccgacgccaaacgcacaaggcaaccgcataacaaggcccgagagacctttatccgctccatgctgcgcagcatgcagacccggtatgcggagcaactcgactacacccccgatcaggcggagctcaatcgcgccatgtcgctgctgcgcatgaacgaacaggtgcgcaaaacgttgaatctgtgctggctgccgatgaccgccccctggcttatcgatcagctcttcgctcacccggaacgcctgaagtccttggccggatggatgaccgatgacgatctggccactctcgcacgaccgaaaggttcacctctgacccggtcggatattccgctgcttgacgaggcgatggatctgctgggacccgatcccaaaaccgtggccaagcagtccgccgccaatgccagacgcgccgccgaagagcagtacgccaaagacacgttggccgcaaccggcctcggtcagggcatcgtatcgagccagatgctgctcgatcagatgaacggcgacgacggcgagctcaccgcccagcgcgcagcagccgatcgagaatggacctatggtcacatcgtggtggatgaggcgcaggaattgaccgcaatggattggcgaatgctcattcgtcgctgtccgtcacgatcgttcaccattgtgggcgacgtggcacagacctcggcactggccggcacccgacgttgggacaagacgatgaaccgactgtttggcgaaggccattgggacctcaatgagctgaccatcaattaccgcaacccgcaggaggtctccgacctcgcctcccgttttgcgcagaacgaaggactctatatttccacggtgaacgcggtccgcgccttgccggattccgtgtctcgacacgtggtagacgacatgaaggctctgcttaccgttacttccaaccaggcggcacagctggccaatcattttgtttcggcggacggcactggacgcatcgccatcatttgcccggacgacctcattaagccggtgcgcgaagcagtaaggcatcgcctatccagtctgatggccccatccgaatatcagcgtcttatcgaccagcccgaatgggatgagcagatcagcgtatgcggcaccgaaatggtcaaaggcctggaattcgacgctgttatcgtcattgaacccggacgcatcgaagatgacgccccaagccgtttggtcgccgcatccgacctctacgtggcaacgaccagaccaacacagaaactggttatagttcggacaaaagaggacgagcgttccctgaacatctaaggtaaaagatatgcctaaagcactgttactggaaaacatccatcctgacgcagccaaatcgctgcgagatcacggcttcgaagtcgaaaccatgaagggagccctgaacgaggacgagctcatcgacgcgctagagggcgtggatctcgtcggtgtgcgatccaagaccaatgtcactgcacgcgtactgaatgcccgcccgaccctcagcgccatcggatgcttctgcatcggcaccaaccaagtggatcttgattatgccggcaagcacggcatcgccgtgttcaatgcaccgtattcaaacacccgctccgttgtggaactggtgatttgcgacatcatctgcctgatgcgtcgcatccctgcgcatacgcatcacatcaagcacggcttgtgggacaagtcggcctccggttctcatgaggtgcgcggcaagacgctgggcatcatcggatacggcaacatcggttcccaactgtccgtactggcggaagcgctgggcatgcgcgtggtgttctacgacatcgaggagaagctcgcactgggcaacgcccatcgttgctcgacgctgaacgaactacttgagcagtctgatgcagtgactttgcacgtagacgggcgcaagtcgaacaccggcttcttcggcgaggatcagttcgcgcacatgaagcaggacgccatcttcatcaatctatctcgtggattcgttgctgatttgggcgcgctgaagcagcatctcgactccggccatctgtccggtgccgccgttgacgtgttcccggtcgagcccaagaagagcggcgacccgtttgagacggcgcttgccaacgaagataatatgattctgaccccgcacatcggcggttcgacgctggaagcgcaggagtccatcggtcactttgtctcccaacgcctggaggattactggtcgaagggttcgacgtcactgtcggtgaacttgccacaaatcaatctcaccgattgcaagggtgtatgccgcatcgcgcatttgcatgacaatctgcccggcgtactcgcccgtgtgaaccgcgtgcttggcgaggagaacatcaatatctccttccagtcattggccactgaaggtgagctgggatatgtggtcaccgacgtggctcaaaagcccagccccgccacactggaggcattgcgtagcatcgaaggcaccatccgcatgcgtgtcatcggctgataccgcatcgacataaactgcatcagcacgacaaagggcccgtcatcagacgggccttttcttggtatcgaaccattattcgcgcaattcatcgatggcgctctggaaatcttccaggccggagaaattctgatacacgctcgcaaaacgtaggtacgcgaccacatcaagatcacgcagtggcttgaggattgccttgccgacctcgccggaagtcacttcggccagtcctcgagagcgaagatcctcctcgaccttctgccccagcagcttcagatcctcctccttgacaggtctgccttgacaagccttacgcacaccggagataaccttatcccggctgaacggctcagcgccgccggaacgtttggtgactagcaacatgctggtttccacggtggtgaaacgcttattgcatttcgggcaaacacgacgtctacgaatggaatagccgtcgtcactgatacgggtatcaatgactttggtgtcaggattctggcaaaaagggcaatgcatgtccccagaataacgtgaacacacggaaaaacaatacttatcgagtgttcctttactcagcaggaacaattagacgctgtcccgcacgaagagcccctgactccagattgttcaacgagatcagctcatccaccgtctccgagacatcttgcccggcgggcgtgatggaggatgcatacgaccacagtgtgtcccccggacgcactatatagctgatcacctgcgtggcaccggtatcggagcgcgccggctcagccgtcagcatggcgaatccgccccacgccagggctgccgccaacacgaccgccatcaccttaccgcgacgatcgcttcgcacggcgttggttctacgcgccgcaccacgacgcgcagcacgatatgcgttgctgcgcttccccgccatacgacccgttgccatcaccatcgaaccagtcatcacgaccacctctctcgaacaagtgttctatcgaacatctgttcttagagtggcacaaatgttcgaactcgtcaagtcaacactcgaacagatgtttgatttcacacgaatatcacgttatgctgatggggtaacgaaaggagccccgacgtgagcagcattcccctcccccctcagcaggagccggacgaatccactttgaccgagcgccagcgcaaagttttggatgccattcgactccacatcgacgaacagggctttgcgccatcattccgagaaataggtgaagctgccgggctcaaaagcccttcctcagtcaaacatcaactgcaagtgctggaggacaagggctttattcgcatgaacgccaataaaggtcgcgccatcgaggtggtcgctccaccaccggaaaacactgcagcagtcaccgcgaacaccgtagaagagcacaccgccgatatctacgcattccccagtgagtcaatcgtcgaatcgcaggatgttccgctggtcgggcgtatagccgccggcgtacccatcaccgccgaacagcacgtcgacgatgtcatgcgtctaccggaacgactgaccggctccggcaatctgttcatgttggaagtacacggcgattccatggttgatgccgccatctgcgacggtgacttcgtggtggtgcgcgaacagaactccgccgtgaacggagatatcgtggccgcactgctggatgacgaggccaccgtcaagaccttccgcaaggaaaacggccacatctggcttatgccgcacaatcccgcatactcccccatcgacggcacttacgccacgattatgggcaaggtcgtcaccgtattgcgcaagctatgaatttctctcgcagccgattcgctcacatcgtgctatagtcgctctcagttcatgaaaccccggcctcgcgccggggtttcgtcgtatttgcaccataacggaaatggaaatgagaaacggtttcaacaccgtgcacaaggaggaacagacatggctcacaatcatgcaccggcaccatcaccatcatccggcgtcgacgcggccgctcaccagcgcagcctcatcgccacgctggccgtcaccgggtccgtattccttatcgaagtaatatccgccgtgcttaccggctccctggccctgctcgtggatgccggacatatgctcaccgacatgtcagtattggttgcctcgaccatcaccgcggcactgatgcgccgcaaaccaagcaatacgcgcacctggggctgggcacggctcgaagtaatcactgcggccgccggcgctgttgtgctgctcatcgtaggtatctacgcactgatcgaggccggcatgcgtttgttcggtggatctaaagcggagatcgacgatatcggactgctgctgttcgtcggtattctcggcctcgcggcaaacatcatctcaatctttattctcgcctcgcaacgcaaagacaatatgaatatgaaggccgcattcctcgaagtgatgaacgacgcactcggctccgtggctgtagtagcttctgcgttggtcatgatttccaccggctggaatggtttcgatgccgtggccggcgcggtcatcgcattgatgatgattccccgggccatcaagttgctgtccaacgcggtcaaggtactgctggaagagacccctgaggggcttgacctcgacaaggttcgcgagcatctggagaacgttccccatgttgtcgccgttcacgatctgcatgccagcacggtttccaccggcatgccgattcttatggcccacgtcgtagtggaacggggactcaccatggaacaggcagcgggcatcctcacccaacttcaggattgcctgcgcgaacacttccccgtctcagtcccccacaccacgttccaactggagcccgaaggttacagctccccctcctccaacgaactccacgaatgaggctctgtggagcgtccccgtcgttgcccctcggtcgacgtaccctcgtacaccttccctcggtgcgcctagaggccgcacgcgcagaccattattcgcgcaaataaaaaatcctcgactcaatcgagtcgaggattcccgttcgatataaaaatcgttctgcgcgtgcggcctctaggcgcggcaggcgaaggcgtacgaaggtacgtcgagcctgccgtaacgacgaggacgtccgcagaacgattttttatcagaagccgaactgggcggcggtttccttcagcgtctcggcggagcgcttcagagcggcgagctccttgtcagacaccggggtgttgatggcggtgttgacgccctgacggttgaggagggtcggcacggacatgcagatgtcggagatgccgtggaagtccttgagcatggagctcacaggcaggatgcggttggtgtcgtgcatgacggcctcgatgatgtcaacgccggacataccgatggcgtagttggtggcacccttaccgttgatgatcttgtaggcagcgttcttgacttcctggtgaatctcctcgcgcttggcagcatcgagcggttcgtgaccgggcagcggggtccagtcgcacatggggacgccaccgatggtggcggaagcccacagcggaacctcggagtcgccgtgctcgccagcgatgtaggcgtgcacgttcttgacgttgacgccggtctgctgggcgatcaggaagcgcagacgagcggagtccaagttggtgccagagccgaagacctggttctcaggcagaccggtgatcttctgagccacgtgggtggcgatgtcgaccgggttggtgatgagcatgtagatagcgttcggagccaccttgacaaggttcggcataatggccttgagaatgttgacagtggcgccaacgagctcaagacgagactggcccggcttctggcgagggccagcggtgatgacaaccatgtcggcgtcgcggcagatctcaggatcgtcggaaccggcgatggacacagtcgggtagaagctggagccgtgctgcatgtcgagcacctcggcctccacgcgctccttggcgatgtcctcgagcacgatctcgcgagcgacgccacgctgtgcagcggcaaaggcaagagtagagccaacggcaccggcaccaataacagcaagcttcgtgggcttaacggtagtttccgccatgatggataaacctctcttcaaaggcggtctgctgatgaatggcaggccttgtaactaacggtttcactttataaacccgctaagacgtttcgcgggccacaatgcatatccaatgatgccataaccctaatgttttcagcagttgttagcgctcacagccattatgtgattttcgtcacgttatttatgcgattgattgctccatgatttgcgcagccaagtgcgaatcgacatccgcttcgagcgccactccgtcatcgcgatattccacggaatccaccttgccgtattcacgtacacgggaaagcagagaccccgccgtgtacggcagcaacgcattgatatgcacatgcggcacgggcaacagctcttcgaccgcatcgcgcaacgcatccaatcccttaccgctgtatgccgacacgatgaacgcatctggctgcaaggcggccagacgttctcgcttggcgtcatcaatctgatcggccttattgaacacgagaatacgggggatggaggcggtgccttcaatatccgcaagcacatcgttcaccgcatcaatctgggagaacggatccgggtgggagccatcaaccacatgcacaatcacatcggcctctcccacttcctccagcgtggatttgaatgcctcgaccagctgcgtgggcagtcgacgcacgaacccgaccgtatccacgtaagcgaatgcacgcccgtcatgggttttggcacggcgcaccgccgtgtccagcgtggcgaacagcgcgttctccaccaattccgcagaccccgtcagccggttggtcaacgacgatttacctgcattcgtataccccaccacagccacggtaggcagcccgaatctcctacgggagccacgcttgatctcacgcgccggtgccatttcgcgaatctgccgacgcaagcgggcgatacgcgcacgaatcacacggcgatccatctcgatcttggtctcgccaggaccacgcgatccgatgcccgcatccgcaccagccgcacgaccaccggcctgacgggacagagatccgccccagccgcgcagtcgtggcaacatgtattcaagctgcgcaagctccacctgggccttgccctcacgtgaagtggcatgctgggcaaaaatatcgagaatcaccgcagtgcgatccaccactttgactttggcggcatcctcaagtgcacgacgttgagacggtgccagatcatcatccacgacaatcgtatcggcctcttcacgggccacgatatccgcgatttcccgtgctttgccggaaccgacatatgtagcggcatccggcttggaccgatgctgcaataagccatcgcacaccacggcacctgccgtttcggcgagagccgccaactccctgagcgactcctccgccttggcctgggtggtcaccgccgatgaccagacaccgaccaacaccacacgctcaagacgcaccttacggtattcgacctcagtaacatcctgaagctcccccaagccggccacatgtttcagctcgttacgggcctcacgctcctcccattcctggttggagtcttcatgccatcccgcggctcgttgggtatcgtcgagcagcacattggattggccggacaacactcccaatggggcttcatcagcgtcgctgcgatcaatgttggtgtactgggtgttgtcggtcaaaggcacctcggtgtcagtcaagtgttcacgattcttctatgcctccttattatcatcgagtgaggtgacatgccagcattggcatatgcaagaagcgggaaacccgcgggaatggagcgaaacatggccgaacagtatttctccgcggagccatcgtcaaaggacgtgcgccgcacgctcaatgtgacgttgcaaggtcatgatgcccaagtacaggtatcgaacggagtgttttccggctcccgcgtcgacttgggcacttccgtgttgctcaagcacgctccggaaccgccggtatccggcaatgtgctggatctgggttgcggctgggggccaatcgccctcgctctggcgttcgcatcgcccgaagcgaacgtatgggccgtggacgtcaacgaacgcgccctggaactcacccatgtcaacgccgaggccaatggctgccgcaatgttcacaccacacaggtggatgaaaccagcaccccactgccagccgaccgccagagcgcacattgcgagccgattcccggcgacctcacattcgatgcgatatggtcgaaccccccgattcgcatcggcaaggaggccttgcatacgctgctcatggcctggctgcccaaactcaaggtgggaggagcggcttatctggtggtgcaaaagaaccttggctccgactcgctgatcccctggctggacgaatcgctgggcgaagggttcactgcaagcaaatacgcgagctccaagggcttccgtatcattgaagttcgtcatgaaatatgagtatcctgccgaacttcccgtatccgccgcacgtgatgagatagccaacgctgtccgtcgttcacaagtcgtcatcgtttccggtcagaccggttccggcaaaaccacgcagctgccgaagattctgttggaactcggccggggcacacacggcaagcagatcgtgcatacccagccccgccgtatcgccgcacgcacggtggccgaacgcatcgcctccgaaatgggcgtacgtctgggcgatgaagtcggctatcaggtgcgcttcaccgacgaaagctccccgaatacgcgtctgcgcgtggtgaccgacggtattctgctcgcccagattcaacgcgatccgaagctcagccagtatgacacgatcatcatcgacgaggcccacgagcgcagcctgaacatcgactttctgctcggatatctaacggccctgctcccccagcgtcgcgacctgaagctcatcatcacctccgcaaccatcgattcggtgaagttccaagaacatttcgcgcacgcattgcacgagaaagtaccagtgatcgaggtgtccggccgcaccttccctgtgcaggtggtgtacgaaccgctcggcaccgcacccgcactgatgcgtgaggtgccgggctttgcgaccggcgcccgccccggagacgccgactatgacgagctggcgagcgccatcgccgaatccgatgccgatcattcccgcagacgcggcaatgccgattacgccgacgacggcatcaccgacatgcccacagcggtggcccgagcctgtgccgagctggtcatccattcctcccatgagcgcggcccgcgtgacattctggtcttcgcttccggcgagcgcgacattcacgagttcgaggcagctctgcgtcaccattacggcccgcgagccgatgacatgcaccgccccgacgccattgagatcatgccgttgttcgcgcgcctgtcggccgccgaccagcacaaggtgttcgagtctcacacccatcagcgcatcgtcatcgccaccaacgtggccgagacctcgctgaccgtgcccggtatccgttatgtggtggatcccggcaccgcgcgcatctcccgttattcgaagaccgctaaggtgcagcgtctgcccatcgagccgatcagccaggccagcgccgatcagcggtccggccgatgcggacgtgtggccgacggcattgccatccggttgtattcgcgtgaggattacgagacccgtccccgtttcaccgagccggagatcctgcgaacctcgctaggcgcggtggtgctgcacatgctctccgtgggcgtggcccgtacggcggaagacgtcacgaacttcggtttcatcgacccaccggacatgaaggctgtgtccgacggattcaacgagctgaccgagctgaaggccataggccgcaagcgtggcgaggtgacgctcacccataccggtcgtcagctggcgcgtattcccatcgacgtgcgtctgggccgcatggtcatcgaagcggccaaggccggttcaccgaatcttctggcttcggtgctcgtggtggtggcgttcctcagcttgcaggacccccgcgagcgcccggatgacaagcgtgaggaagccgaccgcattcataaccggtatgcggatgaaaccagtgattttcttacggcgttgaatatctgggatcgcgtattccaggcggatggcgatccgagcaacaatgcgttgcgccgtatctgcagaaccgaatatttcagctggctcaggatgcgccagtggaaggatctggtctctcagctcaggcagatgtgcaaggagctgaagttcaaggtcggcgacccgttgccgtcttcccgccccggtttggagattcgtcagctgccattgaatcagcaggccgcgcattcgctgtgctgttcgtgggatacggacggcattcatagatcgatgcttgccggcttgctgtccatgatgggcatgcaggtgatccgagagcccaaggcttccgactttgcgggactcagtggagcggctcgtgcccgcgcgatgaaacgcgcccagaagatgtcgaagaatgactatcaaggtgcgcgcggcactcgtttcgccttgttcccggcctccgccgtagccaagaagaccccttcatgggtgatgagcaccgaactggtggagacctctcgtctgtgggcccggtattcggccgccattgacccggcatgggccgaaccgctggccggccagctaacccgcaccacgtatgcagaaccgcattggtctggctcgcgcggctccgccgtggccaccgcacgcgtcttgctctatggtctgccgattgtgcaggatcgtgccgtgcagtgggggcgcatcaatccgcttgaggcccgtgatttcctgattcgtcaaggcttggtggaaggtgacattcagcagcgcttcagctacgacgaattcgtgggcaggaatcgcgacattcttgaggatgccgccgatgatgccagccgcacccgtcagctggcggacaccgtttccgacgaggatctgttcgatttttataatgccgtcattcccaatgatgtgacctgtgtggccgatttggcgaaatggtggaagaccgatcacgataagcaaccggatttgctggatttcgacccggccaaggtggaacgcctggcatccagcgattcggtcagtttggacgattaccctgaccattggcataccacgggttccgatggccagcctatcgacctgcgcctgagctacgtgtacgacccaaccgatccggccgatggcgtcaccgtgcatgtgccgctcaaggcactctcgcgcattacccccgaccagttcacatggaatgtgccgggcttgttggatgagctgattctggcaatgattaaggcactgcccaagcagttgcgcgtccagttcgtaccggccccggatgccgcacgcacgattcgcgattggattgacgatcattatcccaatctgccgggttccggctcgcagcagaaaccgaatctgccaccggtggatgaggaaggcaccactgttggctggcccgatctggcgcacgtgttcaccaaggccgccatcgctaccgtgggagcgcagattcatcctgaggtgttgggaccggaattggtcgagcgtctgtccccgtatttgcgggttacgttctcagtggagcagcagttgccggccggcaaacatccgcgtggccgccgtcacgcacgcgggccggttaaagtgctgggcaccgccaaagatctgaaggcattgcaacgcgaattcgccgcgcaggcggaggcttcggcccgtcagatggtcaagaaacaggccgaacaggccggcgagcaaggcaagctggtgcaacaggcgaatctgctgcataaggcgggtgccactaccgagtcgagggccacgatgctatggcgtggcgcattggatgcgttgcgcttgccgggcgaacgcatttcgtctcgttggctgggcaccgaagcgttgatgctggctgccgccccctacaagtccaccaaggaattggttgaggatttgcagctggccacggtcaagcgtctgctgccgaacgtcgacaagctcgcggatgatgaagctctggccaacgcagtgctcgacatacgcgaagtgtatgaggataccgtgtaccaggtggcgcatgatgtcatcggcatcatgaagtcttatgccgacgtggataaggccacttccggcaaggccgatctgcccatgctttcggtgttgcagtctatccgtgaccatatcgccacgcttgtctacccaggttttatcggccgcactcccccggatgcgctgaaatcattgagccgttatctgaaggcggatgtgagccgtctgaacaaggcgaaaaccgataagaaccgtgacgtcaagtgggcatggcaggccgacgaggccaagcaattggtcgataaagcattggcacgggcaaaagccgaaccggccggcccgaagcatgaagcactgatgcagcaggccgagcaggcgcgttggatgcttgaagaattctatgtgtctctctgggctcaagaactcggtaccaaggggccggcatcgctcaaccgcatcaagaaagcgctgtcctagcccttaaatcaccgctgaatatacggacgcagcagtgtggtgatgccagcagcgaataatgcgaatatcgcaccgaccggccccagccaggcgagtccaaggagatcgttgaccagaccgccgaccgccgaaccgatggcgatgccgatgttgaaagacatggagttcagggatgcggccaagttcaccgagcctggatgggactggtaagccacgtccatgtatagcacctgagacgcggaattctgcaggtacatgagcatgccgagcaccaccagcagcaacgcgccggccgccggcaccagcgaggcaaaggccagcaggcacaggcagaccgcctgcacacagtaaatcgggcgaatgtgcgtcagcggctccacaccgcgccctttgtcggccaatttgccgccgtacaggttgctccacaaacaggcgcagccataaatcaccaggccaatgctgaggtactgttcgggcacaccgatttcgtctcgcatgatgggagacaggtatgtatagaagacataggaagccgctgcaccgcacaccacatcaagcacgccgagctgaatacggcggtcgaagaacaagcggaactgccgcaggaagccgattttcgccgggtgtgagttgcgcggcaataccaaggccatcgaaatcatcagtaccgcagtaagcacggaaaccaaataaaacgtgacacgccagccgaaagtattggccacccatgtaccaatcggcacgcccaccacggaggcgatggagaacccggagaacacccaggcgatgaatttggtgcggtacttatccgtggtcacatccggcgcaaaagtcatggaaatggccaccagcgtgccggagacggaggcaatcagcagtctggcgatcaacaacaccggatagttcggagcaagggcgcacaggatgttgccgaccaagaacacacccatcaatatcagataggtggcaaaacgggggaatcgtgcggacagtgccgagccgaccggcgtacatggtgcatatacgaaggcgaacagcgccaccagattgcccacggtcacttcggatatcttgagacccgaggcgatatccggcagaatacccaccaccacgaattcgctcatgcccagcataaaactggcgaaaatcaggatagtgaccggaaagttgaagaagcggtcggtacgcgcattggtcacaggtgcgttcgtcatatgtctctctcgcatgctctcggctatgtgggttcagtctgtgtgctcagtcgacgtgattgtttcatctctgctcgtcaaacgattaccatcaactccgcgacaacactattcccacctctgcccgctatcagtcgtcacgacacactatgaaaaccccgccgatgaaccacgcatcgacggggtgcaacagatgtgcaacgcctgcaatcacagcttcggcaggtacttcttcaactcgtaaggagtgacctgctggttgtattccgaccattcctgacgcttattgtccaggaagtagccgaacgcatgctcacccaagacatccgccacgaagtcagaccgctccatgatcttcagcgcttcgtccagcgagctcggcaacggctgaatgcccatggcctgacgttcaccgtcggtaagctcccagacgtcgtcactggtgggctcgcccagctgcatctgcttgtcgatgccgtcgaggccagcagccagcagcaccgagtaggccagatacgggttggccaccgggtcgagcgcgcggaactccatgcgcgcggagttgcccttgccaggcttgtactgcgggatgcgcagcagtgcggaacggttgttgtggccccagcaaatgtagctcggagcttcgttgccgccccacaggcgcttgtacgagttgacgtattggtcagtgaccgcgcagatttcggccgcatggtacaggatgccagcggcgaactggcgggcggtcagggacatgttgaattcctgaccggcctcgtagaaggcgttggagtcgccctcgaacaagctcaggtgagtgtgcatgccggaaccaggcgcgtcggccaaaggcttgggcatgaagctggcatggatgccgcgctccagcgaaatctccttgaccaccgtacggaacgtcatgatgttgtcggcagtggtgagcgcatccgcataacgcagatcgatctcgttctggccaggacccgcctcatggtgcgagtattccaccgagatgcccatctgttcgagcatgttcacggtggcgcggcggaagtccatgcccgggctgcgcggcacgtgatcgaagtagccgccttcatcaatcggggtcggcgccttggaccaatcatcctggctttcgaacagataaaactcaatctcagggtgcacgtagaacgtgaaacccttatccttggccttggcaagcgcacgcttcaacacgtggcgaggatcgccgagcgacggctcgccgtccggggtcagaatgtcgcagaacatgcgagcggtaccttgcgggccgccgcgccatggcagaatctggaaggttgaggggtcgggttgaacgatcatgtcgtcttcggacacacgggtcatgccctcgatggcggaaccgtcgaagccaagaccctcctcaaatgcggcttccagttcggccggagcaatcgccacggatttcagtgttcccaacacatccgtgaaccagagacgaatgaagcgcacgtcgcgttcttcgaccgtgcgcagcgcaaactcctgctgtctatccataatcgcttatcgttccatatccgtgttacgaggggcgttaacatctcaccggtgtgccgtgttacatgattcggcggcgaagccgcgctaaggtgtggttcatgagcgaagaccatctcaccccatccgccaatccacctgtcgatgtaaccagctggaagcaggccaccgatccgcgcgaccggtcacgtgccggcatatccactcgagccaaggcgccattggattcccatgccatttggcaggcgcaggagggccggagagaggcgatcagccttttggaggagcagtccgccatccgcgtgcccgaactggttccgttgcggtacaagcgtatgagcgccagcccgttcacgttctatcgcggcacagtgctcatcatgaccaacgatctggcgaccacgccggtaaccgggataccggtgcagtgtgtaggcgacgcgcatatcggtaattttggtatcttccgctccccttccgcacgactggtattcgacatcaacgatttcgacgaaaccgcggtgggtccctgggaatgggatttgaagcgacttgcggcctcggtggaaatatgtggccgcgccaacaaaatcaaggagaaggatcgccgcgccgccgtggtgcaatgcgtgcgcacctaccgtacccgcatgaagtggttctccgagatggattatctcgatgcttggtacgagcacctcgatgtggaggaaacgctggatcgttttgaaaccaccggttccaagcgcagtcgcgtattgcgcgaagccgccatgaaggcgttgctgaaagacaacgacgcggcagcagccaagctctgcaaattcgagaacggcaagctgcggttcaaatcgaatccgcctgaactggtgcccatcaatcaacttgacgattatgccgacctggatgcattgcaggcgcgtctcgatacattgatcgaaagctatcgtcattccctctacgatgatcgacgctgggtgttcgaccatctgcgctatcaggatgccgcccgcaaagtggtgggcgtcggctcggtcggacaacgtgcatgggcctcggtatggatcgcacgcgacgctgatgatccgatgatgctgcagatgaaggaagccacatattccgtgctggagcactattgcggagcctcgccctatgccacgcacggcgagcgcgtggtgcaggggcagaagctgattcagaatacggcggacgtgctgctgggttggtcaagctttatggccgaggatggacgcaagcgcgattattacgtgcgtcagctgtggaacggcaagggctccatcgacatcgacaatctcaatgcctcaggtttaagcgatctctcacgcatgtgtgcatggtcattggcgcacgctcatgcccgcaccggcgattcgatcgccattgccaactacatgggcggtaccgacgaattcgaccagtccattgcctcgtttgctgtaagttacgccgagcagaacgatgaggattacgccatattcaagaaactcatcaagtccggcgaactcccctgcgcctgatacaaagtaacggttgttgctgggctcgttgcagtcatctttgacgccaatgggcttgccgtccgttcggtatattctctaacgcaaataattctcgtagaaagcggtcatttcgagaattgtttgcactaactcgcgctcagtgcaaataattctcgaaataagcattttgttcgagaaatctttgcactggcaacgactcagcgcaagaaattctcgcaatcaaggtttatttcgagaatttcttgcgctgagaaaacaccaacgtttgtcagtgccaaatcacacatcatcgagcgacttcgagcgcttcctgaagcgtgaaggcacgcgcgtagagggacttgccgaggatggcggaatctacgccaatctcggccagagtcttgatggcacgcaggtcatcaagcttggaaataccgccggaagcggtgaccttggcatcggtgcgttcagccacttcacgcagcagtccgatgttcggtccggacatcatgccgtccttggccacatcagtgaccacgtatcgcgagcagccgaccgagtcgaggaacttcatggtctcgaacaggtctccgccctccttggtccagccacgagccgcaagcgtatgcccacgcacgtcaagaccaacggccacccgatcgccatacttcttgatgaccgaagcggtccaatcagggttctccaaggccgcggtgccaatgttcacacgcgcagcaccggcctccaaggcggcatccagtgaatcatcatcacgaacgccaccggacaattcgatattgacccggtcaccaagttcgtgaacgatttcacgcaactgatcgcggttgttgcccgtgccaaatgcggcatcgagatccaccagatgaatccattcggcaccggcctcgacccaagtgcgtgccgcctcgaacggcgaaccgtaatccgtttcagaaccggattcaccctggcgcaggcgcacggccttgccatcacgcacatcaacagcggggagaagagtcaacgacatcagagaacaacctttcttatgaactacagcgtggcaatccagtttttcagcaactgagcaccggcatcaccggacttttcaggatggaattgcgtggcagatagcggaccacgctcataagccgccacaaaacgcgaacgtccgtatgtgcaccagctcactcgttcagtggaagtctgcagatcaatgtcaaaacgcgcggtgtcggcgggcttgacctccattgcggcataggaatgcacgaaatagaagcgctcgttttccacaccgttgagcagcacggaatcgggagcggcctcaatggtgtcccagcccatatgcggcaccacatcggcatccagcagattcaccgagccaccgatcagaccgataccggaggcatgagcaccatgttccagaccacgttcaaacataatctgttcgcccacacacacgcccaatactggacggccagcacggatacggtcatagatcacgcggtcgccatcgacttttttgagaccgtccatgcaggcggcaaacgcgcccacacccgggacgaccagaccgtcggcttccaaagcctgacggtaatcggaggtaagtgtggtatcgacgccaaggtcggcaagagcacgcaccatggatcgtacgttgccaaagccataatcgaaaacaaccgctgtggtcatagtctgtcctaacctgttctattcctacgcctattcgatatgcgatccgcggccaccacgcccacgcttggtgtggtcggcgagaatctgcatggcctggtcatgatcgaggtcggccgactccaccacttcaaaaccttgggttttgagctgattcaacgagacgatgccgagcataagatcctccacaaatcgcggagtggacgaaaacagcaccggcggagcaaaggtctggccaacctgcccctgcatgatcatggacacttcgagcttgtccgcacgattgaccgccaaaatcaccaccatgccggaaaccacggtggtcagatctttggcggccgcctccggagcgtccccatcaagattcttcagcactgccaccgcaccctgattggcaccgatgcatgcagcggagatgtccgaaagctggcagaatgcggccagaagatccgccgaagcgatacgggtaacgattaacgccatcttggctttgtcaccaagaaggccagccagctcattatcgaatccggccgagggatccaccacatcggccatggcttcgttgacggcatccgccacagaactagagatatcatctgcggcttgtgtatcagcgccgttatcaatcgacttggcatccgccgcagaatcggcttgatcgtcgtcccccgtatccgtgtcgttctcgaattccttctcgaatccggccagtgcagcctccagctcctcgtcggagaaatgcgtatcgtccggattgaaatccttatcgtcggacatcacagggctcccttggtgctgggcacaccatccacacggggatcaatttccatggcaaagcgaagcgcacgggccaaggccttgaattcagcttcagcgacatggtgcggatcgcggccggcgagtacctgcatgtgcaggcaaatgccagcgtgaaacgcgatggattccatgacgtgacgaaccagcgagccagtgaagtggccaccgatcatgcagaattcgtagccttcgggctcgccactgcacacgcagtacgggcggccggagatatcgaccacggctttggccaaggcctcgtccaacggcacggtggcatcggcaaaacggcgaatgcccttcttgtctcccagcgcctgcttcagggcctcaccgaacacgatggcggtgtcttccacagtgtggtgcacatcgatatcggtatcgccatgcgcatggatggttaggtcaatcagcgaatgcttgcccagcgcggtcatcatatggttgtagaacggcacggaggtatcgatatcggttttaccggtaccgtcgagattcagctcgaggtcgatgtgcgattcgctggtctcacgaacaatatgtgcggttcttgccatcatgtctcctggttgataggtgtcgcatcatgccgccgcaatcgataatggtcacggcagcatgatgtacgagtctcttatgctgcttctactatacgaagcacttcggcaagggcattacggaacgtttccatttcctcgtcagtgcccatgcatacgcgcagccagccgtctggcccgaccacacgaatcagtacaccacgcttgagcaattcgtcaaaaatcgcctcacggttgtcgaaatgcccgccgaaaagcaggaagttcgagccggattcggccacctcaagcggctgccccttataggtctgctctttaagccaggaagcagttgcctcgcgggtctcgcgcaggtgttccactcggctcagctgctcgtcggtgtgctcaaacgcagccagtgcggcggcctgggtcacggcggacagatggtatggcatacgcacgatgcgcacgcagtcgataatgcccttggacgcagccaagtaaccgactcgtgcaccggcgaaagcgaaagccttgctcatggtgcggctgacggccagattcgggtggttcttgataaggcttaccgcgctcggggtgccgggcttgcggaattccacgtaggcttcgtcgatgacgaggatcgggtggacgccctcacccgcgccagccacttcagcggtttcgcaggcggcaagaacgcgctcgatgtcttccatcggcagaggggtgccggtcgggttattcgggctggtgagcaacaccatcgaaggcttgacctcgttgatggcttcaagcaccttgtctacgttcaacgtaaagtcggcgttgcggtgagccagcttccaaccggtgaaggtgtcgcgggcgtattccgggtacatggagtacgtcgggtcagcgccgagagcggtcctccccgggccgccgaaggcctggaacagctgcagcataatctcgttggaaccattcgcaccccacagctcgtccacatccagacgggcgccggattcacgggccagataatcgctgaacgcctgacgcagctcaatatgttcacgatccgggtaacggttcagcgtcggcgcaatctcacgtacacgcttggcaatggtatcgcatacagccggatccgatgcatatggattctcattgacgttaagacataccgggacatcaagctgaggagcaccatacggttcctcaccaatcaaatcattgcgcagcggcaggtttgcgggaatcgagctcatcgcagaccggcttctttctcctgctcgcgcagggtggccttgtcatagggatccttgacgaaacggctcagcacgcactcaccgtgagccggcaggtcttcggaaacggcaaaggcattgatacgggcagccagtgccttcaggccttcctcgtcatattcgatgacttcgacaggcttcatgaaggtgtgcacgccaaggcctgcggcaaagcgggcggtaccgccggtgggcagcacgtggttggagccggacatgtaatcgcccagcggcaccggagagtacgggccacggaaaatggcaccagcgttcttgatacgcttgaccacggcatcggcatcctcggtctgaatctcaaggtgctcggcggcataagcgttggccgcatcgatggactggtcgaggttgtcggtcagtacgatggcggactgggtgccgctcagggacgtgtggacgcgctcggcgtgctcggtcttcggcacacggtagttgaggttctcctgcaccttctcagcaatatcggtggagtcggtgaacagcacggaaccggcaagctcatcatgctcggcctgtccgatgaggtcggcggccagcaggctcggattagcggtcttatcagcgatgatgccgatttcagtcggaccggcaaccgcatcgatgcccacgaatgcggaaacaagagacttggcggtggccacgaagatgttgcccgggccggtgatcttgtcgaccgggtcgcacaatacgtcgccatcctgaggctcgctgcccttggcgccgtacgcgaacatggcgatggcctgggcgccaccgaccgcgtatacctcatcaacaccgaggatggcgcaggtggcaaggatggtcttgttcggcaggccctcctcgttatcgcgagcgggcggagtggcaatggccagcgattcgacgccagcggcctgagccggcacggcattcatgatcacggaagacgggtacacagccttgccaccaggcacatacaggccgacgcgctgaatcggaatccaacgttcggcaacacgagcgccctcggccaagtcggtgtagaagtccttcggcacctgattggcagccacaacacgggcacgacgcacagattcctcaatggcggcgcgcacttcgggatcaagtgtggccagggcatcctgaatcgcttcgaccggcacacgcaggtgcttcgggcgcacatggtcgaatttctcttcgaagtcacgaagagccgcggctccgcgctccttcacatcgtccagaatcggacgcaccaagtcggtggcttcggaagtgcccattgcggcgcgcggcatcgcagcaagcagttcggcacgggacagtttgcgaccacgaaggtcaataatgcgcatgatattctcactcataatgtcccatcgtagcaacgtacggagtctaaccgccgaggaacgcccatgttcacccgtatcgtgagattatcggaacgctatgagctactcgagaacgcgaaacgcggacggtgcatcgtctttgaccggcacatcctgtatgtcgatatggcgtacatcggaccaccgcgggcctagtttcagctgcttcaccagcgcctgcaccgactcctgactgccttgggcctccacttcaactgatccgtcgtatcggttacgcacccagccgctgacgccaagttgacgggcctgtatgaccgtgaaataacgaaagcccacaccttgcaccagtccggtaatcaccatgtgtttgcgcaccacatccgaggcttgctcttgcaacgaatggttctttgaccaatgattcatcagcttccccgttcagttcgataaccgttatgccgggcgtagaatctcagcacagccacgcatttcctcatacaataaaatatggcaaagcatagctatcggcaaagaggaactatggcaattcaatcgacaatcacgctgaacaacggcacggttattccacaggtgggcttgggcgtattccagacgccggatggcgataccacggtgaatgcggtgcagactgcgttggagaacggttatcgtcatattgacacggcgatgatctatcgtaatgaggcttcagtgggcgaaggcatccgtcgtgccggattgcctcgtggcgacttcttcgtgactaccaagctctggaatgacgatattcgcgcccatcgcggcaaggatgcatttcaggaaagcctggatcgccttgggctagattatgtggacttgtatctgattcattggccggccgatgaatggcaacaagcgtgggacgacctgcaggagatttatgcctccggccgagcgaaagccatcggtgtcagcaacttccagaagcaccatatcgatgagttgcttgccaacagcgacgtgctacccgccgtagatcagattgagtcctccccgcagttcaccaatcatgagttgattggacagctacgttccaagggcattgtcgctgaggcatggagcccgctcggtggtaccggaggcaatctgctgggcagcccggttcttgctgaaataggcgccaagtatggcaagtccgcagctcaggtggtgattcgttggcacatccaacgcggcgtcgtcgtattgccgaagtccactcatgccgaacgcatcaagcagaacttcgatgttttcgatttcaacctgacgtctgaggatatgacagacattaccgcactcaacaccggcaaacgcaacggtgcggatccggataatttcgatttctgatccatacgctgcacaatacgcaaaaaggggattccccatgacgaggaatcccctttcccatcaaaaaagattgcggaccgtcctcccctattaggaaagacggtccgcaacatttcgtaacggatataacgcaatacgttaacgccggatggatcccttgaatggcttatccggagatagcgcgacacgtcccatatcagtccccagaacgttcagcgtaatctccgtgggcttcgaacagcgcaacgtatattccactgtctgatccgtccatgtcgcatccacttggattccgcctcttgcgcggagcgcatggaaggttccctcatgccaatcctccggcagggccggaagaatgcgaatccagccatcgtggctttggacaagcatctccgacaaagccgccgggaatccaaggttcccgtcaatctggaacggcgggtgggcgcataatccgctgccgtacacgcctccgcccagcagattggtttcagcgttcgcatccaccggccgcaggaacatgcctatgattcgtttggcatgttccgcatcacgcagacgcgcccacatgatcatgcgccatacgatgctccaaccggaaccatcgtcgccgcgcacttcgagggatttcctagcggcttcctccaggtgcggagtctgagacgtgatgcctgcaccaggatgcagttcgtaaaggtgggacagatggcggtgctgtggatcggattcgatgaattcgtcgttccattcgaggattcttccatcagctcccaatcgcgtttcagccagttgggaacggacggattccgcttcatggaccagatctctgtcctcttcgtcaaggttttccaaatcgtgggaagcctgaattaaatcatcaagcagattacgcacgatggccgtggcattctcactgctttgtgcaacggataccggttttccgttcaccaagaaacagttctccggtgatgttgcaggggacggggccagtccatgctttgtctccgataggaaatccatgcagaatcgcgcgttgtcccgcatgatcggccagatgcgggccaggtacgatgcatcctggttgaacaaatattcatcgaacaggttccggcacatccatgcctgaccgaacggccagaacgaccacatcgggtcgccgttcgcaggaagggccctgcgccagagatcgacattatggaagaccgccgatcctcggcagccaagaatcctgtcagcggcgtcgtgccccggcactagcagctcctcattcatggagacgagcggctcgatgagttcttggagggcgcatgggcctgtcatccaatagttcatttcgacgttgatgttcgtcgtgtaggcgctgtaccagttcgggaagtccttatggttccaaatcccctgcagattcgcaggttgggtgtgtggcctggacgaggaaataagcagataccggccaaaatcgaacattgcctccgccagcatctccagacgatgcggttctttgttctcatccgagcgaaggatcgccgagaacggtagttccgtatcgtcatcatgggctgaaccgagatggatggccaccctgtcgaaatatctgcggtagtccgcgatgtggcggtcgagcatggtctgcaggtcagtcgaccactcgtcgatggttttctccagatggtcggcgataaccgtcatgcttcgttccggctgctggtcgcttcccttgaatccactcatactgcggaagcagagcgataacccggtgatattcgaacattgcagactgttgtcacccacattgacgtcaccacctgtgacggtaagggagaacgcaccggcgtacgccattccagttccgtcccgctcatcttcccaaggattttcagaaggatgaggcagaagtccgatgttgagtccaggcatccgacccatgacgatgagggtggcccgatggccgtcggataccgtttccaacgaggcgcgtgattgcttgaggaaagtgccggagacactgatgttcacatcaatcggcgcatccgatgacatcctgtagaccaacagatcatcgggctcgctgcaccatgcgtcgacatgaacgttggcatcacccatctggaacgtttcaccggcgagcgcccttgcaagatccagctggcgtttcatgctctcacggccgtctgcagaggtcgagtattgaatacgggccgttccgaatggctcgtaaatctgctcgtctttttcctgcagtgtggcatccttgatgattcgcgtggcggcgttgtagtcgtcctgcaacgacgcctggcgtgccttggccacaatctccggcgtcaccggcgaggtttccgcgtgtggatatcctgaccaaagggtgtcgtcgttgagatacagcacgtcggtttccggttcggagcacaggaccgctcccatgcgtccattgccgagaggaatgccttcttcccagcacgaagagattccatcgaatgtgagtttcatgcgtaaagcctccttggcagatttgcttatttgagaatgctctggatattgcggtactgttcgtcggtcagctgcacggcgggttcatggatggacgtgtcgattggcagtcccttcgccttgaccgcgcccttgatggcgctgatgaacaggtcggcagtgtcgtacaggcgcatcagataggaaatgcgttcagccgatttgatggccgtggcgtaatcaccggactgccatgcgtgatgcagactgacgaaagtctccggctccacattggtcaatccgcacagcacgccattgccgccgctgattcggttgacggtgtagtactcgtcgaatccggacagcacgctgaacgatggattcaccttacgaacggcagcgatgaccttcctggtgtggctgatggtgtcgacggtgtctttgatgccgacgatgttctggttctccgctgcgagatccgccaccagctcaggtgtgaggtcgttgcccgtcctggctgggaagttgtacaggatgaccggcagcgtcgtcgccttggccaccgcagagaagtagcgcttcgcgcaatccggtgatggtccgaaatagtacggggatactgcaaccaatgcatcagctccggctgcttcgctttccgccgccaatgttctcacattgtctaggttggtgtctcccactccgacgagcaccttcatgcgtccggcgactttcgaaactgcgaaacgcactgcttccgccttcgttttgacgtcgatggcgtagaattctccgatgctgccgaacagcagcacaccgtcgatgcccgcgtcgatgagatgttcaaggtgcttgccccaattgtcgtagtcaatggtcccatccgcgttcgtgatggtgatggaggggcagaacacgccttcaaactgggtgttgcaagtcatgatattttcctttcgacgatatgataggcgttccgcgcgttattgaggaagaagtcgtcgtctcccgcgaaacggttgagcaggattgacagatgactgtcgaaatcggcgtatagaccaacgacaggccaattcgacgcgtacagcaaccgcttgttcgagaacgcggcttgtgcgagatcgagcagggttgagacgaatcgtgggtcatcggttggataccccgataccttgacgtacacgtttggcagctctccgagcctatgcagggcatcggatgaggattcgagattgtgaagatcgaatatgttgcccatatggtcaacgatgacggttgcttcgggcacctgctcacaagcctgagcgagatcgtcaagttcatccacccgtacgcatgcgtcgaatggcatgttcttatcggtcataagctgcaaaccgcggatgaagtcatcttgcaggcaccgtccccgcggcgatgccggcgtatgcaatggctcacgaacgccatgtgcgtacagcggcacgcgcatggccggcccgacggtggaccgcatggatgttgccaacagcagaggatcatggttttcggacagcagccggtcttccaatgacgtatcgtccgtgtcgacttccacatacacaccgccgatgaaattaaccgcagcgtctggatggcgctcattgtacgaggcataggcgcgtttgaggcagtccatgccgcaacggcgggtgatggacccatccgttcgatggccttctggattgcggcatggccgagcacgtcatccgggcaggtcggttcctcaacccacgcgagatcgtagtccttgaatttgccgatccattcaatggcctgcggcacatcccagacctggttggcgtctacggcaatggcgatgtccgggccgaccgcttcacgggcgagcttgagcctgcgcaggtcgtcttcgaggttttgaccgaccttaagcttgatctgcttgaagtccatgacctcggtctcttgcttggccaaacggaccatcttctcgtcggaatagccgagccatccggcggcggttgaatatcccgggtagccgacttccttgaggtgggcgatgcgctccgccttgccttcctgggcggcacgcagaatctcgatggcttcctgcggagtgagggcatcagtcaggtagcggaaatcgagagtcgcaacgagctcttcaggctccatctcggaaaagaactcgccatcgcaggtggcgcagtaggccacaccgcgaccagagtattcggactccccttcaaaccctagtttgcgtgggttggcaccggtagcgatgagaatttcgttatacttcctgctattcccctcatgtgattgcggagcaagacaggttttagatttgcgattatgcggcaaaggactgcagatatgagaagaccccgggagccgtcaggctcgaccggggtcctcatattttaagttgaatgcggcggcgtgctactctcccacaccctgtcgggtgcagtaccatcgccgtgccaggccttagcttccgggttcggaatgggaccgggcgtctcacctgggccatggccgccgcaaatcttctgttatacggtcagacgctggggtctgccggcgtgtggcggcctgggaaccggatagcggacgcgatgcgttgattcgtcttgtgttcatcccgtgctcattgtcgtgcgggatggttcgcagcaggatgcttgcgttccaaccggggttggattgttgtgttgcctttcgtccgttagtaccggtcggctccacccctcgcggggcttccacgtccggcctatcaaccacgtgttctgcatggggacttcaaggacccgtagtcctatggaatgcttatcttggagcaggcttcccgcttagatgctttcagcggttatcccttccgaacgtagccaaccggccgtgccactggcgtgacaaccggcataccagaggttcgtccacccaggtcctctcgtactatgggcaggcctcctcaacattccgacgagcgcagaggatagagaccaaactgtctcacgacgttctgaacccagctcgcgtgccgctttaatcggcgaacagccgaacccttgggacctgctccagccccaggatgcgacgagccgacatcgaggtgccaaaccatcccgtcgatatggactcttgggaatgatcagcctgttatccccggggtaccttttatccgttgagcgatgccgcgtccgtacaccggcaccggatcactagttccgactttcgtccctgctcgacccgtcagtctcgcagtcaagctcccttgtgcacttacactcgccacccgattgccaaccgggctgagggaacctttgagcgcctccgttactctttgggaggcaaccgccccagttaaactacccgccaggcactgtccctgaccaggatgactggtcgaggttagacatccaatgcgaacagagcggtatttcaccttgcggctccaccgcggctggcgccgtggcttcgaagccttccgcctatgctacacaatccacaccgaatgccaataccaaggtatagtaaaggtcccggggtcttttcgtccttctgcgcttaacgagcatctttactcgtactgcaatttcgccgagctcctggtcgagacagtggggaagtcgttacgccattcgtgcaggtcggaacttacccgacaaggaatttcgctaccttaggatggttatagttaccaccgccgtttaccggggcttgaattcaccgcttcggccgaagcctgacggatcctcttaaccttccggcaccgggcaggcgtcagagcgtatacagcggcttgcgccttcgcacgctcctgtgtttttggtaaacagtcgctaccccctggtctgtgccacccccaaaagctccacgggcaagccgcttcaccatcgggggtctcccttaaaccgaaggaacgggagtgatttgccgagttccttgaccaggattcgctcgatcgctttggtattctctacctgaccaccagtgtcggtttggggtacgggcggcacgccgcctcacgccgaagcttttctcggcagccgggatcaccggatatcgcgccctgcggcgcccatcatcgcacctcgcccacgcgccccacggatttgcctgtgggacgggctgcgtgcttgaccacggaagaccacctccgcggccggctacccttctgcgtcactcccgcgctgacctactaccgttacggtcccaacaggccagggcatccggctcccgaaggagacgtaagcccggacccggaggttagtactcgcggattcggttttgtcggttgcatgccggtacgggaatatcgacccgttcatccattcgactacgcctgtcggcctcgccttaggacccgactcacccagggacgatgaacgtggccctggaacccttggtcgtccagcggacgggatcttcacccgtctttcgctactcatgtctgcattctcactcccatgcggtccacggcgggcttgcgccgccgcttcgccccgcatgggacgctctcctacccagtagcaaagctactgccgcgtcttcggtggtgtgcttgagccccgctacattgtcggcgcggaaccactagaccagtgagctgttacgcactctttcaagggtggctgcttctgagccaacctcctggctgtctatgcgactccacatcctttcccacttagcacacgcttggggaccttagacgacgatctgggctgtttccctttcgacgacggagcttatcccccgccgactcactgccgggatacgcatcacgggtattcggagtttggttgctgttggtacccgatatgggcccgcaagcatccagtcgctctaccccccggatgtaatcgatccgacgctgcacctaaatgcatttcggagagaaccagctatcacggaatttgattggcctttcacccctagccccaagtcatccccccggttttcaacccaggtgggttcggtcctccacacggtcttacccgcgcttcaacctgctcagggctagatcatcccgcttcgggtccaggacacgcgactcaaacgccttttaagactcgccttcgctacgcatacgccacacggcttatgctcgccacatgccactgactcgcagactcatttttcgataggcacgccgtcaccccacaagggggccccgacggttcgtaggcgcatggtttcagagactgtttcactcccctcccggggtacttttcacctttccctcacggtactcgttcgctatcggtcagacaggaatatttaggcttatcccacggtcgggacagattcgcacgggattccacggggcccgtgctacttgggagacgcgatcgccagaccatgcgcgttcgggtacggggccctcaccctctgcggcccggtattcaacccggttcccctggcacatggttttatgcaactgacggccggcccgtcggagccggcaaacgcgatccctctacaccccgcgcgcaacccccgacgggtatcacacgcgcaaggtttggcctgatccgctttcgctcgccactactcacggaatatcctttcctgcaggtactgagatgtttcacttccctgcgtaccccccgcacacggcggtaccggcccatgacggccggtgggttcccccattcggaaatcctcggatcaaagccctgttggcggctccccgaggcatatcgcagcctcaaacgtccttcatcggtcctgtctgccaaggcatccaccatacgcccttgcaggcaacacgcaccacacggtgcgcatggccgcaaggatccttcctagcaaattcccagacgacaaatcatcacactaaaatgatcacaaaacgatcgaaacaaacactaaaaaatagagttcgattcgaaatcaacagcaagaacgaggaaccaaaaggaaaccccgtcttgctcgcgtccactatccagttctcaagccaccacgcaccaccacgccgtccggacgggaccagcccgccatcaggcacgatgggcatcgaatcgcgccaggccaaagcctggggtggcgatccgggagcccaaaagcgcatccgcaccactcccgcggaacatcccacgacggacgaaccgaaagcccatgatctcttccacaccagcagccccaggccgccgcgactgccgcggcgtcggggttcgcaccgccggacgaacatccggctgcattctccgtagaaaggaggtgatccagccgcaccttccggtacggctaccttgttacgacttagtcccaatcacgagcctcaccttagacggctccctcccgcaaggggttaggccaccggcttcgggtgctgcccactttcatgacttgacgggcggtgtgtacaaggcccgggaacgcattcaccgcgacgttgctgattcgcgattactagcgactccgccttcacgcagtcgagttgcagactgcgatccgaactgagaccggttttcagggatccgctccagctcgcactgtcgcatcccgttgtaccggccattgtagcatgcgtgaagccctggacgtaaggggcatgatgatctgacgtcatccccaccttcctccgagttaaccccggcggtcccccgtgagttcccggcataatccgctggcaacacggggcgagggttgcgctcgttgcgggacttaacccaacatctcacgacacgagctgacgacgaccatgcaccacctgtgaacccgccccgaagggaaaccccatctctgggatcgtcgggaacatgtcaagcccaggtaaggttcttcgcgttgcatcgaattaatccgcatgctccgccgcttgtgcgggcccccgtcaatttctttgagttttagccttgcggccgtactccccaggcgggatgcttaacgcgttagctccgacacggaacccgtggaacgggccccacatccagcatccaccgtttacggcgtggactaccagggtatctaatcctgttcgctccccacgctttcgctcctcagcgtcagtaacggcccagagacctgccttcgccattggtgttcttcccgatatctacacattccaccgttacaccgggaattccagtctcccctaccgcactcaagcccgcccgtacccggcgcggatccaccgttaagcgatggactttcacaccggacgcgacgaaccgcctacgagccctttacgcccaataattccggataacgcttgcaccctacgtattaccgcggctgctggcacgtagttagccggtgcttattcgaaaggtacactcaacacaaagtgccttgctccctaacaaaagaggtttacaacccgaaggcctccatccctcacgcggcgtcgctgcatcaggcttgcgcccattgtgcaatattccccactgctgcctcccgtaggagtctgggccgtatctcagtcccaatgtggccggtcgccctctcaggccggctacccgtcgaagccatggtgggccgttaccccgccatcaagctgataggacgcgaccccatcccatgccgcaaaggctttcccaacacaccatgcgatgtgatggagcatccggcattaccatccgtttccaggagctattccggtgcatggggcaggtcggtcacgcattactcacccgttcgccactctcaccaccaagcaaagcctgatggatcccgttcgacttgcatgtgttaagcacgccgccagcgttcatcctgagccagaatcgaaccctccacaaaaaaacctcgtgaaaagcatccgaacagatgactcacaaaacaaaaattgacgagcacgtccttaaggaaggacgccctcaaaaaacctcacccctcatcaaaccctcccgggtacccagccaccacacaagcggccaggcgaggaatgaactggcaatcattgactataaagaagtagtacaaacacgctcttgagttctcaaaccaccaccacaccagcacacgaaatcccgcatcttctctaggagggaaccccgtcgcgctgagcggcaacaggtgaataacttacacgagcacatggattcatgcaaatcgggcataacaaaacacgccacaatcgttgcaacgacggcgttctatcggcgtgtcgaaaatggcttacatcacacctttaccatcacaatacgccagcttttctctgcacaatggagcgaaatcaaaagttcatcggcgtgtcgtaatagttcattccatgttcaattctccacagcccgattatgcgaacggctccctcccgcacagggcggaacgggagccgaatcaattcagatcacatggtattcgcgtagcagggtggcaatatccgtgccatcgagcttcttaagcaccttcttgaccacggccttttcaatgaagttgagcttcatatccgtcaccggtgcgccgtcacgcagtttgacggtggcgttgagcaggttgcgtacgtcatagacgctgccccacacttcaggcacgccacgatccactccgagcagcgtatagacggcttccataccggtacgcatcgaatattcggtggtgaagatcgtatcgcgtggggtttcggcgaactggccgaggaatgcgaagttcacggcgccatcgggcaccacgtccgggcggtcgccggctgcgcgaggcatgaagaatgcagtgatgtatggcatcatcaccggcacggtattggcatgatgtttggcaagcgactcgatcttgtcggtcggtacgcccatgtggtagagccactcctcacagatttcctcgccggtgcattcggtcatcggcttcttcacatagttgcccggcttgtccgggaacaggccatagacccatacgcacagctgatccttgggctgatcgcggaactgctgttgacgattgagcgtccagctcatcagccagttagagtcctgcacagtgacgatgccgccggtgacgaccttgccggagaacggatcgcgcttgcatatcttctgaatatacggaggaatctcatcatccaaagtggtaacagtggcgctcatccacttggtggcgttcgggtcggaacagaacttttccggatgaccgaagctcggatcctgttcggcgatacgcctccacatatcccagccaccgcctggcttcagatccggattccatgcggcgggcgaattctgcgaacccatagtggagttctccacgcagccgccgttggtgatgaacaccaaatcgttttccgtcagatcgatagaggacttctccccttcctggctgacatcgatgcgtacggcgagcttcttggtgggggtgctggctggattgcgcttgaagaaaccggaagtggcctggattttctggatggtgtcttgtccgacgccagtatgctcgcgcttggggccgtctcccccaccgatggcgaattcgacgttctcgaccttggtgttgtatcggaattccacgccatgagattccagatatttgaccatgggcaaaatcatcgactcgtactggttgtagcgggtgaatcgcagtgcggagaagtccggcaagccgccgatgtgatgaatgtagcgcttgatgtacagcttcatttccaacgctgaatgccaattctcaaaagcgaacatggtacgccagtacagccagaagttggagttcagcacctcgtcatcgaagaaatcggtgatcggcttgtcatacaggtcctcgtccggagtgaagaacagcttcatgatttccatggaagccttgtcagacaatccgaatttgcccttgagtccggcatccttgccgagatctttggtggcgcggcataacgagtaattcggatcttctttgttgagccaatagtattcgtcgagcacgctgactccctcggtctcgatggagggaatcgaacggaagagatcccacatgacctcgaaatgattgtccatttcgcggccgccgcgcatcacataaccgagaccaggaatatcgagaccatcgcaggctcctcccggtacgggatccttttcgagaatatgaatatgatcgcctggcatctggccgtcacgcaccaggtaacaggccgaagacaaggccgccagaccggtgccgatgatatatgcatgcttgctgtctacgccggatggcttcttcggacgggcaaacgcctcatagttgccgctgctgtagtacatgttccgcctccttggggatgaattgacaatccatcaactcttctgtacagatatcttgtcgcgttattgccggacacgccataggcagtgtccggcgttctgctgcatttgtttgtggattacattaacgggctttgccattgacgttcgccctgcgcattcggcttatgtgacgaatcagatattgccgcgcgagtgctggttggcccaggactgagactgcacgaaggtggcggggtcggcactcacattgcccttcggatcgtgcagggcatcgatggcagcaagttccgtggcagtcaggtcgaaactggcactggccagattggacttcatacgttcgacgtgcttggacttcgggatgatgatgcgaccttcttgcgtatgccaacgcaataccacctgtgcgggcgtgacgttgtgggcctcggccgcagagacaaccggctcggattcgatgtccttgccatggccgagcgggctatacgcttcaacggtgatgccatgtgccttgcagaaggcgagattatccggctggctgaaacgcgggtgcacttcgatttggttcaccgttggggtttcgccggaatcatcgataacagcctgaagatgctcgggaaggaagttgctgacgccagccacgcggatagcaccttcctcttgcagtttgagcagcgccttccatgtctccttgtagagatcgactgcggggaatggccaatgaatcaggtacatgtcgactacatccacgcccagcttgcgacgggattcctcgaacgcgatgcgtgccggatcatagccttgatcgcagttgcgcaatttggtggtcacccatactttgttggccatgccagtagcgcgcaatgcatcgccgacttgttcctcgttgtagtaagcggctgcagtatcgatgtgacggtaaccgatttccaacgcttcttcgacggcccgctgcgtatcttcgggcggaatctggaatgtgccgaatccgatttgtggaataacagtgtgagccttgttctgcaaggtgattcccggcgattgcaatacctgagtcatatattcctcctcagagcggttcctatgccgacctcattgtaggcatccgcaaccgtttggaaaggaaatgatctgtactattgcgccgaattatcgtgctggatgattgatgagatcgcgttcaatccatgccatgacgagatctgccaaacggttcacttccgcttccgtcagttcacgccctttgggtatgtgatgccatttttcgatgcatccccggcagcatgtggcggtggcatgctgggcggtgaatactggatgaccacgccacggtgtttgtttgccatcatttttcggctcggccgcacctacccgctcacgcagcatttcatgcgcatgccgatcgatggtcgctttacctttgacccgagcgtaggcacggtctttgtcggtcagcacgaatttggcacgaaatgccgaatgctgcaaacgcgtcagcgtttcagcaatccactgttgttcatcatcggccgtcatgcctcttaagcttaggcagcgggtagacagctgggaccgaagagaatcttgatctcagcaaacagtgaagtatctcgtttgacgcggaaccgatcgccgaatgtcagcacctgcgcattgcctttctcgtccatcaccgccaagtgcacctcgcaatagccgggatggttggtgagcacttgcccgagttgcatcatatgttgacgatccaaagccgcgtgcggcaatgtgatggtcagcgggcgctcgtcctcggattccagagtgggcacctgcagctcggtggcacgcatggaaacggtctcatcgcgcagttccacctggcctcgtatctgcacgatggcatccacggccagctcggcggcagcggcctcgtagaccttaccgaagaacatgcattggatagaactttccatgtcttcaatagtcacaatggcccatgggttgcccttcttggacacacggcgatccacgccggtgattagaccggccaaggtgacctgctgcccctcacccatggtcttggctcgatcgatcagatgtgcaatggacatttcacgcagggaggccagtaccgactgcataccggaaagcgggtggtcggaaacgtagagacccagcatttctcgttcaaagttgagcttggttttcttgtcccattcctcgatatccggcacggtgacagaggcgtcgcccatggcttccgctcccccatcgtccgcatcggagaacaggtcgaactgaccttcggcctgcttacgcttgagactgaccactgaatcaatggcggcctcgtggacagtgaacaatgcgcggcggttcgggtcaatcgaatcgaaggcaccggccttgatcagcgattcgaccagtcgccggttgagcgcggtcagaggcacacgccgaatgaagtccatgaagttcacgaacttgccgcgcggtccttcgcgctcggcaatgatgtcggccactgccttatcgcccacgttacggatggcaccaaggccaaatcggacgacgtctcctactgcggagtacgcgtaaaccgattcattgacatccggggacagcacctggatgcccatgcggcgcgcttcgcccagatacagtgcggtcttgtctttgttggtggcggcaccctgcaacagggcggccatgaactcgaccggatagtgggttttcagataagcggtccaataggaaatcagaccatatgcggcggagtgcgctttattgaaagcgtaaccggagaacggcaccagaatatcccacacggcattcgccgcttcctcggagtatccgtgctccttcatgcctgcaaagaatggcaccttttccttggccaacacttcgggcttcttcttacccatggctcgacgcagcacgtctgccttgcccagcgaatagcctgccaggattcgtgcggcggactgcacctgctcctgatagatgatcagaccataggtctcatcgagcacctgcttgagcggctcctcgagttcggggtgaataggcgtaatcttctgcagaccgttcttacgcttggcgtagttggtgtgcgaatccatactcattgggcccggtcggtacagggcgataagtgcggaaatatcgttgaaattatcaggcttcagcgttttcagcagcgaacgcataccgtcggaatcaagctggaacacacccaaggtgtcgcctcgggccatcagcttgtaggtttccgcatcatcaagcggaatcttggtgtagtcgatagcgggcttgccgttggcttcgatattcttcagggtgtcgtggattaccgtcaagttggacaggccaaggaagtccatcttgaccagacccaacgtttcgcaggtgtggtattcgaaggtggtggtgatggtgccatcggtacgttccagcaatggcgaggtatcggtgatgggtgcgctacccatgatggtggcgcacgcatgtacaccggtctgacgaatcaggccttcgatacctttggcctcctcagtaatgcgcttggcatcggggtcggaatcgtacatctcgcggaattccctggcctcggcatatcgtttggccgaagggtcgaaaatatcatgcaggctgatgtccttgccgccagtggccgccgggggcaaggccttagtgactttttctccaaccgagaattcataacccatgatgcgggcggagtccttcagcgcctgcttggttttgatggtgccgtagatcacgcattgggcaaccttgtcggtgccgtatttttcaccgcagtattcgatgactcgggcacggccttcaggatcgaagtcgacatcgatatccggcaggctcacacgctccgggttcaggaacctctcgaaaatcaggccgtgcttcaacgggtcaagctcggtgatgcccatggaataggcgaccatggcgcctgcagccgaaccacggcccggccccaccatgatgccgtggtccttggcccattggatgtaatcggccacgacgaggaagtaaccgcagaactgcatttggcagatcacaccgcactcataatcggcctgcttgagcacgttcagcggtggattgccgtcataacgcttttcgagtccctcttcgaccttcttcaggaacagcgaggtctcgtcccagccttccggacaggggaactgcggcatgaaagcgccgtcctcgtgatcatcgaacatgacgttgcaacgttcggcaatgagcaacgtattgtcgcaagcgtcgggatgatccttgaacagctcgcgcatctcctcggcggttttgatgtaatagccggtgccgtcgaacttgaatcgatccggatcatccagtcgggagccggagttgatgcacagcatggcatcctgtgcgccggcatcttcggcatgcacataatgggaatcgttggtggccagcagcggggcgtccagcttcttggcaatggtcagcaggtcgtcggtgacctggttctcgattgtcagaccgtgatccatgagttcgataaagaaattgtctttaccgaagatgtcctggaattcaccagcggcacgcaatgcctcgtcgaactgtcccaggcgcagacgagtctggatgatgcccgaagggcatccggaggatgcgatcacacctttggagtaggtggacagcacttctttatccatacgcgggtagcgcataacacggccttcaagattggccacggacgaggctttgatgaggttgaccaggccttcgtcgttttccgcccacatggtcaggtgggtgatgagaccaccaccggaaacgtcatcacgacgctgagcttcggtgccccagtgcacacgggacttgtcctgacgcgcggtttccggggtcacgtaagcttcgatgccgatgatgggcttgacgccgttggccacacagttggtgtacatctcataggcaccgtgcatgttgccatgatcggtaatgccgactgccggcatctcaagttcggcagctcgcttggccagatccgggatcttcgacgcaccatcaagcaatgaatagtgcgtgtggttgtgcagttgtacgaagttcttcccgtaatcagccatgcgttccaccttaccgtgtggtcttgtcggcggtagatatgtaccggcgagcgtcatagttggccggttttagatacgaccgctccgcaaccccctaccttgacattcgggcgaataatcagtcgtacaaacaacatcgtgatgcctcccatcgcgcattccgatacttccatcgtcaagacccgtccttggcaatattgaaagcgactacgcacagtttcccattgagatacaattaccggtagctatctaccgttttttataacgcgtccgattggccaaggagggactattatgagctcatcgccactaaccgcagcaccttccaccgcgcagatcgtcatcgaaatcctcgagctgctggattcccgcacggacagcgagcatgggctgaccgccatcgaaatcagcaaaagcatcggcgtttcggagaagaccgtgcgcggacatctcaaggcattgcatgacatgcagccgttcggacgccgggtggagcatctggagcggcgcgaccttgccgaggcggaaagccttgaccccaagcccggatggtatatcgagcccgtatttgacacggcccagatgcggctgcttgccgatggcgcggcgctctcgcattcggatggcgaatacttgcaggatcttatcgcgaaaatctacacattcgcgggcaggtcaggccaattgcgcggactcaaccagctggcgacgccgaagaactacaacaccgagttcctcaacaacatcgagctgctcaatgatgccatcgaacacgagcgcacaattcggttccactactgcacgtacgacatcaatggcaatctggtcccccgccttgacagttccagctcccccaaggaataccgagtcgacccctatcatctgatgtataagaacagcaagtactacctcatttgccacatgcatcagcacgacagcctgtcctatctgcacgtggagcggttccgcgacttgacgatgagcagtaccgatcattcgctcaaacgcacgcttgacagctttagcccggttccgggaacacgattcaacgtcacacaacatatgaacgaacgcccttacccgatgaatgggaaagccgtaccgattcacatgcgcattaagggcacgctcgaaccgttatatgactggttcgacgaggctaccgtcactcaaatcagcgacgccgaatacgacgtgcacattgtggccaacgaacgagccacattatggtgggcattgcaatacgccgattcgcatttcattgagattctcgaaccacagtctttacgcaccatgttgcatgataccggccaatccctgacgcagatgtaccaagaaccatgaggaccattcgctaatccaccaacgattcaaccggctcggtatgacgagcgcgcatgacatcaagagcagcagctaagtcagcagggtaatgagactcgaccgtagtccagacgcgcgtgcggggatggcggaattcaagcttcatagcgtgcaaccattggcggtcaagacccagagcctcggacagcaccggattggcaccatacatggggtctccgcataacgggtgaccaatggaagagaaatgcacacgaatctgatgggtacgaccggtctccagattcacggataccaatgtggcctcgtggccgaaccgctccagtacatcccaatgagtgatggccggctttcctgctggagtgatgcagaatcgaaaatcagagactttggctcgcccgatcggagcctcgatggtggctttgtcctctttcaacccaccctgcaccagggcatgataggttttcttcacttcatgctgcgcgaattgccgacgcatttccgtgtacgccaactcggatttgcataccagcataaggccggaagtccccacgtcaagccgcgagactatgccctcacgtcctgcagcaccataggaagtaatgcgcactccgcggtcgcgcaacgatccgagaaccgtaggcccggaccatccgactgaagcatgggccgctactcccaccggcttatcaactacgacgacatcatcgtcctcatagaccacggccatatcgttcgcgatgggttccggttcgacatgattctcaaccaaatcgaattcgacggtctcccctgccattaaggaactggaacgtgcgacctcgcgtccaagaatgcgagcctgaccggagtcgatcagatcggcggccttggaacgcgatatgccgagcatcttcgcgactgccacatcgaaacgcttgccaatcagtgcatcaggggcggggaccattcggctcattattcggcatctgcctccgaatcggaagacgaatcagcgatgtgcgcggacttctcatccagctctttctgcgagaacggctcaccgatgagaataagcacgactaggatcacagcggcaacaacaagatagacatccgccacattgccgactgaccagccgtaattcagaaaatccacgaccttgccgttgaggaagccgtcggcgtacattacacgatcaatcaggttgcccaaggccccggcaaaggcaaaggacagtgccacggtccacttcgtggaaatcgtgcgtatgcccaataccacgagtaccacgcaagccacaatggccagcagactgattacccaggtggcaccggatcccattcctaatgaggcaccaggattgcgaaccagagtcagggaaagcagtccgggaataactcggatggactgtccgtcagacagcgcggccatggcccacgccttggtgagctgatcagcaatcaacgcaaccgcggctacacatgcgaagacggccacgcgggtgcgcagccgtccctgttggttcatcatatgaacttacctacgctcagttggcctgaggttcagactgggtctgactctcgtagttgttcgattcggaaacctgagcggcaagctggccgaggaactcggtaaggcgtgcacggtattcggtctcgaactgcttgaggctctggatgttgccctcgaccaccttggactgagcctgcaggttgtcgcgcacctgctgtgcgtaggtgtcagcggcagcacgagtgttcttgtcgtactcggcagcacggttctgaacttcggactcatactgatcggcatcagcgtgctgggtcttggagtagttatccgcgtcctgacgagtcttggctgaataggagtcagcatcctgatgcgtgttctgcgcgtaggtgtcggcatcagcacgggtcttgtcggagtatgcatccgcctcagagcgcgtacggtcagaataggcatctgcttcggagcgcgtacggtcagaataggtatctgcttcggagcgcgtacggtcagagtagctgttggccttgttcaccagttcggtgtacttgttctggctggcctcggtgatttcctgcgccttggtcttgcccttctccacgtactgatcgtgcagctgcatggccagggtgagcattgcggtggcacgttcgggctcggtgcccggcatggaagctgcgcctgcaatcttctgcagagaaccagtttcggtgctcggctcgaccttggagacctgggaacgaagctggttttcgcgctgcttggcttcctcgagctgacgagtgaggtcggcgatctgagcggcctgctgctcaacggcagcaccctgctgctgggcctcggcaagcttgcgggacagctcctcgttggacgcacggaaccgatcgcgctcctgctggatggcggcaatctgctggccaacagccttctggttgccggtagcctgagcggcctgagcggtcagctggtcgatctgagcattgagctgatcgacctgacccttgagctgatcattctgcgcagacagagcacggttggactcctccgcctcgctcagtttggcagcagccagttcggcggcctgagcgtcggactcggcaccgggctgcgcctgtgctgcagcgttcttcagatcggcgttttcggcctgcagcttctgcacctgaccggacagctcggaaatcttagcattcagattgctgacatcaggacccagagactgagtggcctgaccgccggcgactgcctgacgtcccaaagcctcaaccgtttcggtgacctgatcgaggaagtcatcgacctcgtcaacatcgtagccttccttgaaacgaacggtctggaaggtgtgctccctaatatctttcggcgtcaacagagccataaatcttgcacctcgctttggggcattgcccgcgcttacgttgctatcaaatcaaaatgctatcacgacctcatcttttacagtcattttgcgcagattttacggcatgtatgtcgccgcaagaatattgctcaaaggcgctaaaagatgatgagcacaacgctttcgagtgccaccagcgcaaaatacaacactatgaaactaatatccagactaatggcgcccaacggcaggggacgaatatatcgacgcagccatctcaacggcggctcggtgacggaatacacgatattgatgagctgagccaccacacctcgcggataccagttacgagcaaggatggagacccagtcgagaatcatgcgcacgaacagaacagtgatatatgcgttgattagccatgcaaggacacggccgatcatggcgaatacaaaggacaacatggtgtcaccctaacaagcatgtatgagaatttgccgacagcgcaaataataacgaccggtctctctcgagtaccggtcgtcgccctggctgcttgccaatatgaagtgctgctagttagcgaatagatcgtgcgcggaagccgtagtggtcggctcttcgaccttgatgttcacctgagccgggctcagcaagaacacgcgcggggttacacgttcgagcgagcctcgcacgccaaataccacacctgcggaaaagtcgacgatacggtaggccacggcttcggaaactccagtgaggttaaggacgaccggcacaccatcacgcaacgcacgacccaccagctgcgcatcctcataagacttgggatgaatggtggtgatgcgattgacgcgaccaccctggaaaggagaagtcttggcagatggactggccgtcgactgcgcgatcggagtcaccgtgtggtcagaatcgaaactcggtttggccgcaggctgctgctcatcctcctcgtcgaagtactcgtcatcatcatcgacgacatcactcatgcccagataggacatcgcattcttcatgaacccagccatggatcagtcctttcagcgcaggaagtcggggatatcgaggtcaccggccggatcattgacggcgatggccggatgttcggaagtcgagtcatcgaacggcagcgaagtcgaatcgccggaaacgggcgcatacgacggaaccgtggcagccgcttcaccagccggattgtcggcaggatgagctgccgccggagcgacgggctcgtcggcaggaacgaccggggacacggtctgatgatcagacgcctcctgtgcggaaacaggatcgaagccagcggcgataaccgtgacacgtacttcgtcgccataggcgtcatccaaagcgagaccccagataatctgtgcctccggatgaatggccttacgcaccagctcggtagctgcagaggcctcctgcagcttcagatcagtcggtccggcgatgttgatcaatgcaccatgtgcaccctcgatgctctcttcgagcagtggggagctgatggcgatctcggcggcctgagtggcgcgatcctcgccccgcgcggaaccgataccgaacagcgcggtgccggcaccacggaggatggagttcacgtcggagaaatccacgtgaatgtaggaattcatcgagatgaggtcggtgatgccctgcacaccggcaagcagcgcggtatcggcggttttgaacgcctcgatgataccgatggagcgatcggagagctcaagcaggcgatcgttcggaataacaatcagcgcgtcaacttccttacgcagattgtcgatgccgtagtcggcagaagcggcacgctggggaccttcaaagccgaacggacgagtcaccacggcaatagtcagagcaccctgctgatgtgccgcacgagcaacgatcgggctggcaccagtaccggtaccgccaccttcgccgcaggtgacgaacaccatgtcggcacccttcagggattcctcgatatccgactggtgatcctgagcggccttggcaccgcgctccgggtcggctccggcgccgagtccacggctggacttgtcggatagtgagattttcacgtcggcatcagaacgcataagatccttcgcgtcggtgtttaccgccacaaattcaacgttctgcagtccttcggcgatcatacggttaacggcgttgccgccggctccacctacgccgacgaccttgatattggtcttgtcgttgaactcagtctgggcgatctcgctcacgtttgactcctgtcacttcacggttacacctaagagtagcgcaaataggatactggtggagggaaattcacgcgaggaaaagtgcgtgttgtgcatttcttgtttgaaattgtcaaccaatcagtagctggcatccatcggatcatcgccaaaaagcgcttcgcgctcctcatgggtggtggttcgtgattccaaccagccgtaaggcaaatgaacctttttggcgaagcgtacacggccacgcggcttgtcgaccacacgtggagggtattcgatggtgggatcaagcttgccgatctctcgatccacgtcggcaagattctcacactccatgaatgccttacgagtactgccgccgaccgggaaacctttgagataccaggcaatatgcttgcgcaggtcatgaacagccatcatttcatcaccttcatagaactgggtcaatagttcggcatgatgatggattacccgacaaacctcgccgaggttcggattaagacgttcaggattgtcttcaaacgcgttcttgatattggcgaacagccacggacggccctggcagccgcgtccgatggctacgccatcgcagccggtctcacgcaccatttcaagcgcgtcttcggctccccaaatatcgccattgccgaacaccggaatatcaaggtgttccttgagctctccgatgcgggaccaatcggagtggccaccgtaatattcggcggtggtgcgggcgtgtagggtcaccgctttgcagccttcctcctgagcgatatgtccagcttcaaggaaggtctcatggtcgtgatcaatgccgactcggatctttgcggttacggggatgccggccggctcgcacacggcaaccacacgctgaatgagttcagtaaagatgtcagttttccagggcaaggccgaaccaccaccgcggcgagtgactttgggcaccgggcagccgaagttcaaatccacatggtcggccatgttttcatcgaccacgattttcgcggcctgttcggtgatggagggattcacaccgtagagctgcagcgaacgaatcttctcgctactggcaaaatggcacagacgcagagccttggggttgcgcgccacgagggcgcgtgcggtaatcatttcggccacgtagagaccgtcgggaccatattcctcacagatcacgcggaatggccagttggtcacacccgccatcggcgacagcaccaccggagtcggcacggtgatgttgccgagctgaaccggggcaatgtgtacctgcgtttccgggcgtgatggagcgtccgtgcgcggatcgaggttgttggtctcgtgagtagcggtgatggtggtttccatatccatgctcttgctcccgctggcgggagctgtcgaaccgtaggtgagaccgagggtggtcttccttgtgcagaaaagaccaccctcagtccggctgtcgccggccagctcccgccagcgggagccagtcaccttgatatatcaggctttagtacaggccgccggcttcctgaacgccggactcaggccaggcttcgccacccatctccacgggcttcagcggcacgcgggtgcgcttctcgccgatgcgggcggccacatagtcggccaccttgtcgagagcgacgcgatcctgggccatggtgtcacgctcacggatggtcacggcgtggtcctcgagagtatcgaagtccacggtaatgcacagcggggtgccgatctcgtcctgacggcggtagcggcggccgatggcgccggactcgtcgtagtcgatcatccactcgttgaagcgcaggtcatcggccaggttctgggccacggtccgcagttcgggcttcttgctcagtggcagcacggcggccttgaccggggccagacgcgggtcgaggcgcagcacggtgcgcttgtcgacgccacccttggtgttcggagcctcgtccacgtcataggcgtccacgaggaagcacatcagggagcgggtcaggccagctgccggctcgatgacgtacgggatatacttctcgccggtggcctggttgaagtagcacagatcctcgccggagtgcttggagtgcgcggtcaggtcgtaatcagtacggttggcaatgccttcgagctcgccccagtcggagccctggaaaccgaacttgtattcgatgtccacggtgcgcttggagtagtgggagagcttctccttcggatgctcgtagtggcgcaggttctccggcttgacgccgaggtcgatgtaccagcgggtgcgggcgtcaatccagtactggtgccattcctcgtcggtgccgggctcgacgaagaactccatctccatctgctcgaactcgcgggtgcggaagatgaagttgcccggggtgatctcgttacggaaggacttacccatgttggcgatgccgaacggcggcttggaacgggaggaggtcatcacgttcttgaagtccacgaagatgccctgcgcggtctcggggcgcaggtagtgcaggctgttctcgtcctcgaccgggccgaggtgggtgcgcagcatcatgttgaagtcacgcggctcggtccactggccacgggtgccgcagttcgggcagacgatgtccttcatgccgttctccggcatcgtgtcgccgtgcttctcggcgtaggactcctcgagcttgtcggcgcggttgcgcttgtggcagttgaggcattcgacaagcggatcgttgaacacgctcacgtggccggaggccacccacacttcgggaggcaggatgatggaagtgtcgacaccgacgacatcaggacgggtgacgaccatggagcgccaccattcgcgcttgatattgtctttgagagcgacgccgagggggccgtaatcccatgcggaacgggtgccgccgtagatttcgccggcggggaatacaaagccgcgacgtttcgcgagggatacaacttcatcgagtttggactgagccacaatgcaccttctggtttgaacggtttggggtctaataacaaccgcttcagaatagccgtatatggtgacaggtagaaaggcactgtctttttgcaaattgctttcactgaaagcgcgtcagtgagagcaatttgcaaaagcctatggaaacaatcgctctgctaccacggataattcagacgcgccagacctgacgacacgtatcgaacaaattcgtcacgataatgtccatgttggcgcatagcgtcggcaacgtaatgcaggggaactcgcatgtggttcgcgagttgagaaaggcctaagcctgacccttagaacctgttggttaagaccatcgtagggagcagtaatgagcagtagtgcatcatcgtttaccggttcgtccagcgactgtaccaccggcacaccggtttcatccgattcaccgattcgcgagaacatcgcagccgccgtgcgccgcgtacgcgagacgacgccgctggcccagtcgttcaccaatttcgtgaccatcaatctggtggccaacgcgcagctggcagccggcggcactgcggccatgagcttcctgccggacgacgtgatcgaaaccgcgaaaatcgcgggcgccaactacatcaatgtgggcacgctgctgccgttctataaggacgcgctgcctgaaatcgcgcagcgactcaattatttggacaagccgtgggtgctcgacccggtggccgcaggcatcgggcgtacccgcacctttattcttcaggccttcaaggccgctccccctactgtgattcgtgcaaacgcttccgaggtgatcgcgctggcgaatatgtgggggctcaacaccgaatccgtgggggacgcttccgaacaccgccccgccggagtggaatccgtcgatgacgtggattccgcaaccggtgcggcggtggcacttgcccggtatctgaccgagcagcacgccaagcattcgtctcacgatgcttccatcccctgtgcagtggccgtgtccggcatcgccgacctggtgaccgacggcgaaaccgtgtaccggctgccgggcggcagctcgatgatgaccaaaatcatcggtgcaggctgctcgctgggcggcgtggtcgccacgtatctggcggtgtccgatccgttgaccgctgcgttgtccgcgtcgctgctgtacaaccgcgcgggcgaggtggccgatacgacttcgcatgggccgggctcgttccaggtcgcgttccttgacgcgctgtggaatgtgaccgccgagcaagtggcggaatctgagattttggtgcagtagtgtactgcccccgctggcgggggctgccggcaaagccggctgggggcggttcctggagttaccatcctccgccgcttcgtggcacctcccgccagcaggaggaaaacactcgataccacatcaaccccaattcacttttctaataaaacttccacaagaaacaacaaaggtaggaataataatgagtaatgaatacccatacgcctccatgcgcgacagttttgacctgtccgcgtacttcgtggtgggccccgacgactgcaaaggccgtccgctgaccgacgtggtggatcaggccctgcgcggcggcgcgaccttcatccagctgcgtgccaagaaggccgacgcttccgagctgaccgacatggcccgcgacatcgcgcaaatcatcgaggacaacgaaaagtccgattccgtggcctttgtaatcgacgaccgtgccgacgtagtgtggcaggcccgccgcaagggcatcaaggtggacggcgtgcacatcggccagaccgacatggagccgcgcgaaacccgcgccctgctcggcgacgaggccatcgtgggcctgtccgccgaaaccgagagcctggtccagctcatcaatgagctgcccgacggctgcatcgactacatcggtgccggcccgctgcacgtctccaccaccaaacccgaggcttccgtgggcggcaacgacggctccggcaagacgctggacgcggctcagatcaacaccatctgcgttgccagcgaattcccggtggtcgtgggcggcggcgtgaccgcagccgacatggccatgctcgccggcaccaaggccgccggctggttcgcggtctccgccatcgccggtgccgagaacccggaagaagccacgcgcgccatggtcgaaggctggaaagccgtccgcggcgacaagaagcacggctacgctccgcgcattgtggcccacgcccccgccgccgacacccaggccgcccaggaaggcaccgccgcagccggcagcgaagacaccgaaaagaagttcaccaacgccaagcaggccaaggacgcgcagaagctcgccaagcagcagcgcgtggacatcgccgcacgcggctccgagcagcgcgacaaggcgcacatccgcaagaccaagaccgtgccgttcacctaccagtacggctcctacgatctggaagtgccgtacaccgaaatcaagctgtccgatacccccggtgtgggcccgaacccaccgttccacgattacagcaccgaagggcccaagtgcgatccgaaggaaggcttgaagcccctgcgtctcgactggattcgtgaccgtggcgacatcgaggattacgagggccgccgccgcaaccttgaggacgacggcaagcgcgccatcaagcgcggccgcgccaccaaggaatggcgtggtcgcaagcaccagccgatgcgcgccaaggaccacccgatcacccagatgtggtacgcccgccacggcatcatcaccccggaaatgcagtacgtggccacccgcgagaattgcgatgtggagctcgtgcgctccgagctggccgccggccgcgcggtgatgccctgcaacatcaaccaccccgaagccgagccgatgattatcggttccgccttcctgaccaagctcaacgccaacatgggcaactcggccgtcacctcctccatcgacgaggaagtggagaagctgacgtgggccaccaagtggggcgccgacactgtgatggatctgtccaccggtaacgacatccacaccacccgtgagtggattctgcgcaactcccccgtgccgatcggcaccgtgccgatgtaccaggcccttgaaaaggtcgaggacgatgcttccaagctgagctgggagctgttccgcgacaccgtgatcgaacagtgcgagcagggtgtggattacatgaccatccacgccggcgtgctgctgcgttacgtgccgctgaccgccaaccgtgtgaccggcatcgtctcccgcggtggttccatcatggccgactggtgcctacgccaccaccaggagagcttcctgtacacgcacttcgacgagctgtgcgacatcttcgccaagtacgacgtggcgttctctctgggcgatggcctgcgccccggctccctggccgacgcgaacgacgccgcgcagctttccgagctcatgactctgggcgagctgaccgagcgcgcctgggccaaggacgtgcaagtgatgatcgagggcccgggccacgtgccgttcgataccgtgcgcatgaacatcgagctggagaaggccgtgtgccacaacgccccgttctacaccctgggaccactgaccaccgataccgctccgggttacgaccacatcacctccgccatcggcgccaccgagatcggtcgttacggcaccgctatgctgtgctacgtgaccccgaaggaacacctcggcctgccgaacaaggatgatgtgaagcagggcgtgatcgcctacaagatcgcctgccacgccgcagacatcgccaagcaccacccgcacgcgcaggaccgtgacaatgcgatttccaaggctcgcttcgagttccgttggctcgaccagttcaatctgtcctacgatccggacaccgccatcgccttccacgatgacaccctgcccgccgagccggccaagatggcgcacttctgctcgatgtgcggcccgaagttctgttcgatggccatctcccagaacattcgcaaggccttcggtggcgaagccgcccagcagcagatcgtgaaagaagccgcggccggcgtgagtgccgatgcacttaccaccgctgccaaggctgctgccgatagcggcgtggtctccgccaacgtgctgagccccgaggagatcctcgccggcatggatgcgatgagtgaaaagtacaccgcccaaggcggcaagctctactccaccgcccaggagtaaacctctctggctcccctctctgaggggagccaattattatgcccggtggtgtcttaattcgggacgacgctcgactcgctcgaaggcggtgacgaggtcggcagcccggatcgcgccgcggcggtccttggcggccaccagagcggcctcggtccagatggcgcacacttcggcgccgctccagccttcggtccgctgtgcgatatccgccaacggcagttcgccctcgattgacagcgaacgggcctgcacctgcagaatacccaaacggtcgcgctcagacggcatcgggaaaggaatctgccagtcgaaacggcccggacgcaacaaagcgggatccacgtcctcaatacgattggtcgcagcgaccaccacaacattgcccttggactcgaaaccatccatcaacgtcagcaactgcgccaccaagcgcttgccgacgccattggtatcgttctcgcgcgaggacgcaatcgaatcgatctcatcaaagaagatgatggcgcgcttgtccgcctgcgcggcggcgaaaatcatgcgcagcgtttcctcactatcgcccacatacttgctcacgatggtcgggccggacaccagatagaactgcgcgtccgccacattggcgatgatgcgggccagatgcgttttgccggtgcccggagcaccggtgaagatcacgcccttgatcggcttggcaccgatcgcacgcatctgcgcactgttgcccagctgcgtttcgataagctccttggcgcgcgtgatcacctgctcataaccgccgaacgaatcgaaggtaagcgacggatcgctgcccggcgtgatgcggtactgcttgatgtcgtcatcgtgatcggattcgcctggacggatggccgtgggccacagcactcgttcaatgccgaacaggtcggtgaactgcacggtgttgccgggcatgatcgaattcgggtaatcgccttcaagcagttcgaggccgtcggaagtctccaggaccacgccttcgttgagcgcacggcgcacgatgcccacacggggcttcaacggccacacatcatgcggcactttacgatagaaatccgtgccgacgagcaacacgtcgcccacatcgaacacctcctgacgcggaaatgtgagctgtgtggtgtgcccattaggcattacgccaaaatatgcggtgcgttcatcgtcaaaaccggtgatgcgtaccaagacgccgtcacggcgcagtacatcgttatcagccatgtcccctcccgaacatttcatgaatcaatcgcaatcagcaaaccctcccatctcaccacaggagcggcaaaacatcaaggaaaaccgctccgaaaaacatcatgggccccacttagaatgaacactatggcacagattgcaacatctacacttcccgctgttctcgcgatctccggctccgactcgtccggcggtgccggcatgcaggccgatctgaagaccatgctggcttgcggcgtgttcggcatgagcgccatcaccgcgctcaccgcacagaacaccaccggcgtgcgttccattcaggacaccaaaccggacattctcgccgaccagatcaacatggtgtttgaggatattccgccggtcgcggtgaaaatcggcatggtgtctgccactgacatcatcgacgtcattgctgaacgactcaccttccatcacgccacgaacatcgtgctcgacccggttatggtggccacttccggtgccaagctcatcagtgacgatgccattgcggccttgaccggcaagctgttcccgatggctacggtcgtgactccgaacattcccgaggccgaagtactgaccgatacgctgattcgcgatcaggaggatatggaggccgccgcccaccgcatcgtggagcgttacggctgtgccgcgctggtcaagggtggtcatggcaccgaggatgccaacgatgtgcttgccgagacggatggaaccgtgacctggtttgatggcgcgcgtatcaataatccgaacacgcacggcaccggatgcacgctgagctccgccatcgcctcgtatctggcgcttggcgacacgctgcccaaagccatcaagcatgcgaagaagtatctgaccggtgcgctgaagacccagctgaatctcggccacggctccggcccgatggatcatttctggaagtatcgctgacataagtgtggttgttaagctccccttgccaggggagcttaacactactgaaaaaggagaatcatggttcttgaccgtaatgccgttactcaggaagtgccgatcgacccggaaaccggcaaaccgtacctcaacaccgtggcagccatccaggtgtcggccaatggcgtgggctccgaggtttcaccatacgtggctcaggccgtcgaagtgattcgcgaatccgccctgccgcaggaaaccaacgccctgttcaccaacgtggaaggcaatctggacgacgtgctcaaggtggccggtgaggccgccaagaagctcgccgagcagggctaccgcacttctctggtgctgcacatggatatccgtcccggcttcaccggccagctgaccgaaaagcccaagctggtggatgagatcctcgccgacaagcaggcgaaatagcaaagcatcgcttccaccagcaagggcatgctttgttattacacgtttcatggggcggtaactcacccatagggcggtaaatatctcatggggcggtaaaaccctcatggggcggtaggcgaaaacggctctattctgcggaaaggcaaaatccgctaaccgccccatgggccaaataccgccccatgagtgttttaccgccccatgggaatcacggttctgccttctttcaacggggtaagagcgtaagtggggcatatataggagcgttacaaactctgttatcgttcacaatgtgaccgcaacgcggcgtgccacaagatcgaacctatagttaagccccatgtagtgagctatctcacaacgattggctcgctacgtggaattcaagacttggactgcaaacgtcgttcatcccacacaatgggagggcgaacggaacacgcagtccaatcaagagttcgctcgccgcaacatcattgagcagttgcacgcgggcaggtttgcaagaagagggctcaaatatgactgctgctgaacagcagatttccggcaatcccgcggctatggaaagcgcacaagcacgtaccaccgtgacggatcaagccaaggttcaggatattatctcgcgcgtggatcgcgcacatgaaaccccgatgttccatcgcatcgtggcgctggtcgccgctggcatgctgatggacagcatcgacgtatatattggcagtgccgttgcctccagcgcgttggccacacactggtccaccgttgcgcaaaattccacctttatgtccgcaggcttcctgggtctgctggtcggttcgctgctggccggcttcgtcggtgacctgaagggccgccgcgtggcttaccaaatcaacctgctgctgtttggcggcttcaccttcctcggcgcattcgccccgaacatggccgtgctgtccctgtgccgtctgggtgccggcctgggcctcggcgctgaaatcgtcaccggcttcgccatggtcaacgagttcgcaccgatgaaccgccgtggccactggtgcgcgattgtctcgctcgtggccaactgcggtgtgccgatcgctatgctgctgtgtgcatggatcatcccccgctggtcctggcgtccgctgttcgtggccatcggtctgggggccgccatcatctggtggctgcgccgcgacatccccgaatccccgcgttggctcgccgtgcacggccgttacgatgaggccgacgccatcgtcaagcagcttgaggccaacggctccgaactgatcgacgcagccgccaaggccgacaccagcgacacccgcaacgccggcggccgttcgctcggcatctgcctgcttgtagctgtggttgctgtggccgccacgaacgtgtgctcctacgccttcacttcttgggttccgacgattctggtcaagcgtggtattaacctgtccagctcgctgctcacctccacggcgatgatgctcggtgccccggtcggctgcctgattggctctctgcttatcgaccgcatcggccgcaagcgcacgattgtgccggccttcctgttcactggcgtgttcggtttaatgtatgccttccagacctctaccgtgagcgcaattatcgttggcttcctgctcatgatgtgcctgtacgtgcttatggcttccgtggtggctgtgtacgctccggaactgttcgccaccaaggttcgcttccgttgcgtcggcttcgcgaacgccgtggccaagctgctcaatgtgttgatgcctatggtggtgggttggatgcttacctcgcttggtgccacgtccatctttgtggccatcagcgcaattgctattgcatcgatgctgattgtcggcttctttggcgcggagactgcgcagaagtcggttgggtgatcggtttcctcacagtggaataactgctgataatgtccattcggcgtcttgcgtggtgatatgcagggcgccgttttgttgttctagtaattgtcggtaacggttgagaccggtaccggtggataggtccacactgccatccgcatccgaatccgatgacgtgcgggccgtgtcgatgcaggcgatgcggacggtgtccagtccgatgccaatcgtcattacatagcccgcttccgggtcggcatgtttggcgatgttgccgtacagttcctccagcagcccggcgatcaggccactccgaccggctgcgccatgagcaccggaaataatcgtctgaccttcaaagccaagctctgataatcggcggtcaccattgctcgcaacatcacgaatttgctcggctagcgggcaatcagcgtctgtgatgccacatgcaatgccagaagcggcatcaacggtcgaatcatgcggagtcactgcactgtgcgccgcttctcccctgccttcaataacatcaatgacctgatgcgtgcgatccaatgcgcccatagccacgctacgcagttcgcgtaattcttcttcagaaggggtcttgccatcggcaatatccttgtcgaatcgcaaaatcaggtatgccaaatcattggatacgtaatcgtgaatgtcctgagctgtgcgttcctgctgacggcggtgagccaactccgctcgagccaagctgcgttcatgattccatcgcgccgccatgccaccaagcatgaagccaataaacaacacggccactggcatcacaccatagagggcaatcgcaccaagaatcacttgcccagtgcgatgctcggcagaagaaccgctcgattcataggcgcttccggtgaagtcgcttcccgactgccctgcgctgtcagacccactggatgaagagccaccatcagcagcgcaaccatcagcaacactaccgtctagggcactactactcgccgcgccatccgcagaaccgctcatcgtgtctgagccgccatcaagccaaggaatggccacgccaccacgcgacaacatccacgccacaacggcaatgccggcaaccgccagcgccaatcgcttatcggcgtatccggcaatacccaccgccaataacacggcgagcattgcacccgacggcatccagatcggactcatgcacaacactatccaagccaccgctaccgccacgcatccggtgaccggacgaaacgccatccaccccacaatggcaacgaatatgaactccgcaagacagtccgccgccgagacactgtcagcagccaagcccgccatggtttccatcgtgcatatcaaggcaacaaccagtatggcaatcaacagccatgcattgcgaacaccgctatccagctcggccaatcggtgtcgtaacgctttcataacagttcctttcctaccatccatgccgttgcacataccgcccatgccaactcttaaatctcatgccgtttcacgcagattgatatggcatgagcgcgactgcgagcgccgagtttggcgagtgcgcggcgttcaaaagtcgccacagtggccacgctgatgcccaatcgctcggcgatttccttggtggtcgacccatccgcatacatacgcagggtgtcgcgttctttgccggaaagcgcgccacggtgcgcgtatgacgtatcttcgagcaccgcgtaggcggttgcggcatccatgaaggacagcgaattaccgctcccctcatctcccagtaccagctcattggtcgacaatccttgggctgcattgcgaatagcgagcgcaatgccgttcaaatcggttttaccaaccaaggcctgcgccccgcagcgagccgcctcgtcgtgaaatgacgcgagcgcgtatgaggtgacacccaccagcccaacctcgggtgttttggtacgaatcgcacgacagacttcggtaccgggcacgtcgcccatagacatatccgtaaccagcacgtcaggccgcttggtggggctcaggcatcggctgatggccacggcacccaaatcgcaggtccatatcacggcaaaatcgctggacatgcgctcgattagcgcgccgaacactttcagcgcatacgggtcattgtccacaatgccgatgcgtatgttgcggttgcgcgcttctcccattacattcaccccttcagtgtgcccgacgccgaactgctccgtcctgacatgtcatggtcactatgacaactatcattccacatttcctgcgcgatttacgatggaatcatcatcaatccttgacaaggcggtaaaggaggacggcaatgaaccgtgcacaagcactcagcaagctcaacaggagcgatatgcgcaatgccgccgccgagcgcgggacgcaacgaatattcgcgtggaaccgcgcgcattggattggcatggttgtactgatagcggtgttgttgctgctgcagtggagctcatcaatgtatctcatgcccgacgaggtccttgacagggctgccaaaaacctgttcgtatggttccccggtatggttctgcactggccattggtgttgggaatcaccaacctgatactcggttcgatacgatccggcagtctgtctttcccattggcgagcgcaatcatcggaccgctggcattcggctgtaccaatcttcgcttacggccggggttcccataccgttcctgggctcagtggtggaagctaatgcacgctgaaagcggccatcagctattggttcattcgttgatcggctcggccatgctgttgatctgttatacggccgttgcgttcatctgctatgcaatcggacgctacggtctgcgcgaattgtttgtggatccgaatccgcagacggcgagcggacgactgctcacatggattcgtcaggatgcgattcgcttcggctgctggctggcgacggcaatcatgtacggcttgctattggcgctgaccttacgaggcggcatggctgcgatggccgccgcgttgctaatcaattttgtgattccgcccgccttgctggtcatcaacggcatctacacgctacgcccggcctcactgacgtatccgtggaaaagcctgctgttcccgttggcgtgcacactggtacctgcgccgatgctcatggcgctcatcacggtgtatgaagacacgtgcccgataggaagtacctgcacgctgatcggcgaccgatacctctcctggggctcgatggatcaggtcttgcatttcgtcatcgtgttcgccgtggcgagcttcctcggattcggcgtggtgtgggccgtgcggtggattgtggctcgtcgcacaaaataagagagaccaaaatatactggaatcaggggcttcgtgcaatgatgcacgagccgatccaagcaaaggggctgaccatgagcgagaaactgatggaacagtaccggttgcgcaaacaacgcaaacgccgtaacgcttgtatcgccgccatcgtgacagtagtgcttgaccttgccgtcgccggcggcgtatggtggacggccggcgatggcagcgtactggttcgcaatatgttcaagccgaaggccacgcctgccacgcagccggtagtcgacagcaccgcagccttcgcctaccgcaccgcaccggaattcctggcgatggaaaccggcgaccgagacaccggcaatgtgaactactcccctgcttcgatgtggatggcgttggccatcgccgcgcagggcgccaatggcacgacccgctcgcaactgaatgagctgctgggctccggttcgctggccgacagcgactaccaatcgctgctgagttcgatcaacgggcaatattcgggggcgaaatccgagatgagcgccgcgaactcgctgtggatcgataacgactactcccttgccagcgattaccaatccaccgtcaagaaaatgttcgaggccgaagtcaccacgctaccgttcgacgatcaggccgccgccaagatgtccgattggattgccaaacatacgaatggttcgctcaagccgaagatcacgctgcgtgaccgtgaagtcctgtccatcatcaacaccgtctatgcggatggccgctggaaggatccgttcgaagagcagtccaccggcgacggcaccttccacggcgaagccggagatgctcaggtgccgatgatgcaccggaccttcagccaaatgacttacagccatgatgagtacaacacttggcagcgggtggagattccattcgacaacagcggcaatctggccatcgtgctgccggccaaagggcatttcgacgagctggccggcaatgccgagaaactcggatgggcgttcggcacgtgttcgtcggcatcccctggcgagggcgcaatgggttgcgccgcggacagtatgcccggatggggcgtctccgtcaactcggccacggtgaacgtcacgctaccgcgattcaccatcgacagcatgttcgactcggaagccaccatcaaggcattcgaaaaactgggggtgaccgatgcgttcagtgcaggcgacgccgacttcaccaagatggtcgacgccggttcgcacggcgagaatctgtatatcggttcgattctgcaaggcacgcgcatcgaggtgaacgaggccggcgccaaggccatgtccttcaccaaagccggcgcagacttcactagcgcgccggtggacaacatcgagttcacggtggatcgcccattcctgtattcgtacgtcaccccggacggcataccattattcatcggtgcggtgcgcaacctcggcggagtcggtggagaacactgatactttcccgacagtccgtcaattagggtgtatcgtttgacgcatggctacgatgaaggaaatcgcgaacaaggcgggggtttccgtctctacggtgtcgctggtgctcaacggacgcgacgaggggcgcgtaaagtccgaaattgcggacaatgtgcgcgccatcgccaccaagctcggctaccggtcgaatccgctggccagttcgctgcgtacaggcaagacgcacatcctcggtttcatcagtgaggaggtggccaccaccccgtacgccggcggtatgattctgggcgcgcagaccgccgcaagccagttcggctatatgctcatcaccgtgagcaccgacggtgagaacagcgagagcgaggaaatcgccgcactcaagcgatacggcaccgacggtttcctgtacgccaagatgtcgaaccgcatcacccatgcgccttcttcgctggccaagacgccactggtgttggtggatgccaccgactcgcttggcaaaatcccgagcgtggaaccggacgagttccaaatcggctacgacgccaccaccagattggttaaggccggatgcgcacgtatcgcctatgtgggttgctcggaaccgatgattgcgcaggatggtcgtttggaaggctatcaggcggcgctcagggacgcctgcctcgactatgacgatcgtctggtcgtcaatgtgctcaataacgggccggcactgaccgcagtcagcgatttgttcgacgccgagcatccggacggattcttctgcttcaacgatgcccgcgcctggtatgtgtacgaatgcgccgcacgccgaggactcacggtcggcaaggacatctccgtgatcggcgtggacaaccatcgcgtgttcgccgaaacgctggaaccgatgctcaccactgtggaactgccgcatttcgagatgggctactgggccgtggccaagctggtgtcaattatcgaaggacgctcgatggacgacgtctcacggccagcgaccaccgctcccctgccgccgatcgacgcgccgattccggcgaagatccactgcacgctgatcgaaaaggcctcggtgaagtaaccgaggcccacgcgatttctcaaggcctccgttcagcacggaggcctttttgcgtctcgaacgggtacgacacgccgatgacgtcaatcgattgacgtaaatcgattgacgtcgcatagtaattactacacaacaacttctacaaaggcacagccgcccgagcagaagcgtcacataaccaataaccaaccaagtagtaatcaaaggatgattatggcaagtgcaaccaaatctgcatggaagaatccttcctatctgcagagctccttcggcatcttcatgttcttctgctcctggggcatctggtggtccttcttctcccgctggctcaccgacccgacccacggtctgggcatgacctccgcagagcagggccagatctactccattaactccttggcaaccctggtcatcatgttcgcctatggtgccatccaagatcagctgggcatcaagcgcaagctcgtgatcttcgtctccgccatcgcagcgctcgtcggcccgttcgtacagttcgtgtatgccccgatgctgactgccggcggcaccacccgtttcatcggcgtgctcatcggctccatcgtgctctcctcaggcttcatggccggctgttccctgttcgaagcgctcaccgaacgctactcccgtaagttcggcttcgaatacggccagtcccgcgcttggggctccttcggctacgccatcgtggcactgtgcgcaggtttcctgttcaatatcaacccgctgctgaacttctgggtcggctccatctgcggccttggcatgctgtgcgtctacgctttctgggttccggccaagcaaaaggaagagctcaagaaagaagccgatccgaacgcggctccaaccaacccatccttcaaagagatgatctccgttctgaagatgccgactctgtgggtgctcatcgtcttcatgctgttcaccaacaccttctacaccgtgttcgaccagcagatgttccctaactactacgcttccctcttcccgaccaccgaaatcggcaacgccacctacggcaccctgaactccttccaggtgttcctcgagtccgccatgatgggcgtcgttccgattatcatgaagaagatcggcgttcgtaactccctgctgctcggcgcaaccgtgatgttcctgcgtatcggtctgtgcggcgtgttccacgatccggtcagtgtctccatcgtcaaactgttccactccatcgaggttccgctgttctgcctaccggcattccgctacttcaccctgcacttcgacaccaaactgtcggcaaccctgtacatggtgggcttccagatcgcttcccaaatcggccaggtgatcttctccaccccgatgggcgccctgcatgacgccatgggcgaccgtccgaccttcttcaccatctccggcatcgtgctggccgccctaatctacggcttcttcgtgatcaagaaggacgaccaggaagtcggcggtgatccgttctacaccgataagcagctcaaggcccaagccgcagctaaagcaaacgcctgagcgcaaccgccaaaatcggcaaaaacacaactaaatcgtgctgcccgaagcgtttcccctttttccgtttcgggcagcattcttaaaacttttatctaaaaactcaataagcaacaattcaacaatcgcaagattcaacaatcatgaagaaaggctattcaacgatgactggcttcactccggatgcacccgtcctccacgaaatcaagaaccacagcgaagctctggcacaggcggaagcaggcgttgcagctatggccgccgaacgcaacaaccgctggtacccgaagttccacatcgcatccaacggcggttggatcaacgatccgaacggcctgtgcttctataagggccgctggcacgtgttctaccagctgcacccgtacggcacccagtggggtccgatgcactggggacacgtctcctccaccgacatgctcaattggaaacgtgagccaatcatgttcgccccgacccttgaagaggagaaggacggcgtattctccggttccgcagtaatcggcgacgacggcgaactcaagttctactacaccggccaccgttgggccaacggccaagacaacaccggcggcgactggcaggtgcagatgctcgccgagccggacaacgacgagctgaccagcgccaccaagcgcggcatgatcatcgactgcccgaccgacaaggtcgaccatcactaccgcgacccgaaggtctggaagaccggcgacacctggtacatgaccttcggtgtctcctctgcggacaagcgcggccagatgtggctgttctcctccaaggacatggtccgctgggaatacgagcgcgtgctcttccagcacccggatccggatgtgttcatgctcgaatgccccgacttcttccccatcaaagacaaggacggcaacgagaagtgggtcattggcttctccgccatggggtccaagcccagcggcttcatgaaccgcaacgtcaacaacgccggctacatgatcggcacgtgggagccgggcggcgaattcaagccggaaaccgagttccgcctgtgggattgcggccacaactactacgccccgcagtccttcaatgtggacggccgtcagatcgtctatggctggatgagcccgttcgtgcagccgattcccatggaggatgacggctggtgtggccagctcaccctgccgcgcgagatcacccttggcgatgacggcgacgtggtcaccgcgccggtcgccgaaatggaaggcctgcgcgaggataccctcgaccatggttcgatcacactcgacatggatggggagcaggtcatcgccgatgacgccaaggccgtggaaatcgaaatgaccatcgacttggctgcctccactgccgagcgtgcgggcctgaagattcatgccactgaggacggtgcctacacctacgtggcttatgacgaccagatcggccgcgtggtggtggatcgtcaggccatggccaacggcgatcgcggctaccgcgccgccccactgaccgacaccgaactggcctccggcaagctggacctgcgcgtgttcgtggatcgcggctccgtggaggtctacgtcaacggcggccatcaggtcctaagctcctactcctatgcctccgaaggcccacgcgccatcaagctcgtggccgagttcggcaacctcaaggtggagtccctgaagctgcaccacatgaagtccatcggactggagtagaccgtaaagacaacgccataagcaggcgagcaatctcaggagtcggccacgctcctcccaaaagcagaccgaaccccaagcattgagccccgaccaccagacggtgatcggggctcaatgcttaccaggcgcagtagctgtgattactgctgcttggtgctggcataatatgcagcgccgacgatgccggcctgattacgcagcgtggcgggcacgatcggagtcttgatgtccacatagggaaggaacttgtcgctttggcggctcacgccgccgcccacagtgaataggtcagggttgaagtacttctccatgaggccgtaatacttggtcagtcgcttggcccacttcttgtagcccaactcctcgttctcacgcacggccgacgatgcatacttctcggcgtcaaggtgcttggggctcagcatgatgtggccaagctctgtgttcgggatgagcgcgccattgtagatcaacgcggtgccgatgccggttcccaacgtagtggcaatcaccagaccgtcctgccccttggcggcaccgaactggacctcggcaaggccagcggcatcggcatcgttcaccacgacaaccggacggccgcaagcttcggagaacgcctcggtaacatccacgccgatccaggactgatcaaggttggccatgaagtcaagcttctggccaggcttgattggagcaggaaaagcgatgcccacaggtgcggactcaggcacttcgaaatggtcgagctgctgcttgactatcttggccaccgcctgcggagtggaaacctccggagtgagaatcttcagacggggttcggcgaaatcgcccttggccagatcgacgggtgcggccttgatgccggagccaccgatatcgacaccgaaagcctgcgcagtttcaatcatcgttgatgtccttcccttcagtattgctttcgttaggattgcgcccagtctaacgcgaatatctttcaaacacgaaaccgacattccacctattgtgcaaacgtgtgcatttttgttgcggcactacgtatccaggacttcgaccccttcgctccttaaaaaaatacggcacaagggaacaccgcgcacagccatcatttccacgtgtcgcgcgcgataatggaatacatgacagaacatacccaacttattgatgcggtcaacattcgcaccgccgtgcgtacctatgatgacgaaccgatcgatgacgacacggcccgtcagctcgagatggcactgcagccaatcaacctgctcggcgatctcaacattcagctggtgcgcaaccagccaaaggtattcgaggccaacgcctcaggccatctgaccaatgcggcgaattatctggccatcgttggccccaagaacgatgaggaagccagggaacgcgccggcttctacgccgaacgcctggtgcttaccgccacgctgcgaggtctcggcacactgtgggtcgccggctcatgggacaaggacgaggccgctaagcactgccgtgtggcatccggtcaggagctctatctcggcgtggtcatcggccatcccaagaaccatctggagtatcgggcgaaatcctatgaagatctctgcgaggcccagcgcacgcaccggccgaccaaatcgtatgagcagttcaccgccacgatgagcgatgaagaacgtgactcagcaccagcgtggttcaaggccggcgtcgaggctgcgatgaaggcgccaagcgccatgaaccgtcagccgattatgttttcgtacaatccagccgacgacactgccgccgcgcatatcgacaccacagccggtgacgagcatcatgcgatgaacgacatgggtatcgccaaactgcatttccaaatcggcgccagccagggccaatgggcatggggcgacagcggcctattcatccataagtgaccgttatagtagctcccggctttgaggggagctaccaccgaaagcaactgaggggagtctcgcaggtacatctccgacagactcccctcagtctcgctacgcgagccagttcccctcatagagggagccaagtaaggactacttcagcggcggcatgggcttccaatcaggatcgtgcatcaacttgcgcgaatcccaccaacctttggcaatctgcaccaagccggtcttgacatgctctcgatccaccatcaccagacgaatgacttccttgatggcggtgagcacagtacccagagcaaaaagcatcgggcggaaatcgccatgcaccatgaaataccgggccatatagccacggttgcgcatgatgtggtaacggttcacgtctgacgtggagttgagctggcggatgccggctatatcccagtttccaatctcacgcgtgcgtcgcaacaccacatccggcaccacaatcgggttggtgaccttgctggcacgatagccgtaaatcgtgtcgtcccagtagataaagaatcgcggatccggcaggccgatttcgctcaccacgcgacgattgaacagaccgccttcaaagcacagggtgttcattacccggtatttggccggaccgaacgcggcaggggcaatcggattcggaatgcccagcggcacaatgaagtcatactgccagtagaacgggccgccatcgtaatcgaaacgggagccctgaatcacctcatgcttatcagtccacttggcaagcttggcgatggcatcgggcagcacggccacatcatcgtccatcacccagaaccatgcggcacccagctcatatgccttggccacgccagcggagaaaccgccagcaccgccgagattctcggactgcggcgcatagaccacacgctcctcattgcctgattgatcggccacggtagtgccccactgaccggtcaccttgccggcaaaaccagcaaccatatccgcggtttgcttggactgctcattgtccacaatgacaatgcgccacggcgcctgctccagtgccagaattgaatcgaacagcacttcaagcagttgctgacgcttgtatgtggtgacgatcaatgccagtttgtcgatagtggtattgggattcttcacttcagccatggtatccattgttgcacttgaccagcacaaaccctctgaacgtctgctgaatctcagctgattgctgttgatttccttgccgaaagtgaaacgcagcttgcacacgtccggcgtatggcgtatgaataagcctgtcagtttcagggaaggtgtaattccttactggcggtgatctgcactccgggtttcataacggagatgtcaggaagcccgcgacccgcgtaagcggctgatccggtgagattccggagccaacggttatagtccggatggaagaaacgagggctctgatgagcatatcttcgcgtatccgcatgcaagcaatccgttccgtggcgccgcaggctgaaggtgcaggctccggctcagccagcacgtcttccagcaccaaactcggctcacacgccaccggcgtggccgattcgggacgctggtccacacgccgcattgccatgtatgcattgttcgtagcgctggcgatggtgaccagcttcatcgaattcccgatcacgccggtcacatggctcaagtacgacccgtccggcatcgtatgcctgattgccggattcgcttatggaccggcagccgccgcgattgtgtccgtgctgggcttcgtgcctcatatgttcgccaacccgtggggttcgctgatggcagtgctggtggcactgttcctgtcggttcctgctgcgttcatctaccgcaagattcgcacgcgcaaaggtgccgccatcggcattctggtgggtgccgtgctggctatcgtggtggcgctggtgggcaacctcatcgtcacaccgatctacgcgcacatgacttatcagacagtggccgcgatgattctgccgatcctgctgccgttcaatctggccaagatggcaattcacgccgtaatcacgttcctgatctacaagccggtctccaacctgctttccaagcagcagtgagcaacctgcagccatgaccgaatccacccataatcccgcctatgcccacgctgccgagctgaagaatatccgtttcagctatgaccgtggcatctcctgggctttggatggcgtgtcattgaccgttcgggccggcgagcgcatttgtctggtcggcccgaacggatccggcaaatctacttttgcccggctgattgccggactggccgcgcccgacggcggcgacatcacgttgttggggcatcgcgcctacgccgatgccctgccgaatgccgacgaatatcgtgcggcccggcgtggcattggcgtagtgttccagaatccggaggatcagctggtcactaccgtgctggaagatgatgtggcgtttggaccggaaaatctgggcattgaacgcagccgcatcggcgagcgcatcgatgattctctgaaatcggttggattggcgtccttccgccagtccgatccaactcgtatgagtggaggccaacagcaacgtgccgccattgccggcatgctggccatgagtccggccatgctggtgctggatgagccgaccgccatgttggacgagtcggcgcgcgccgaagtgatgcgtattctcgatgatctgcaggcgcaaggcaccaccatcgtgcatgtcacacatcatcaggatgagactgtgcacgctgaccgcattgtgcatatggaatccgggcagatcgttggtatcgaagcggtcagcgctcggccgcaaaccattgccaaccatccttcactcgacgagccccaccagccggggcgggatgtggcattccccttactctcggacgcttcaaacgacgacgccacagaccccatcatccgggtttcgcatgtgacatatcgatattcctcagccaagcatgcgaccatcaacgacctgtcgttcactatcgcgcgcggccagaccgtagcattgatgggcgcgaacggctcgggcaaatctactttgattcgactgctctgcgctttggccacgccgagatccggcagtatcgacatagccaacgtgcctgtggcaacatccacaggcgccggtacacgttccaaatccgcaacgcggcagcagcttgtgcagcttcgccgtcatgtgggttatgtgatgcagcatcccgaacatcagctttttgcggataccgtggctgaagatgtggcctatggcccgcgcaatcagggactggcagaaaccgaagtcgccgaccgtgttcacgaagcactggaactgctgcacatcgggcaccttgccgaccgctcccctttcgacttatcaggtggacagcagcgtcttgcggccattgctggcgttattgcctgcaatcctgatgtgctcattatggatgagccgaccgccagtctggacacgcaggccaaagagcgcatccatgaactgctgcgcaccttgaagcagcaaggcgtaaccgtgttgctcattacccacgaccgagcagaggccgagacccttgctgaccgcgtggtgcgtatgccgaatgcggcggagcaaccggattctccggcaagcgatgccctgaataactccaatacagaagcctcggcatccaacacgacctccgcctctgccgatgccgctttctcggtgattcaccgacttgatccgcgcgtgaaaatggtgggattcctggccgccatgttcaccatgttcgccgtgaatacgccagtgcaacttgtcttgggtctcatggtgacgcttgccgtaatcgcagctgcccgactgaacccattatgggtgctcaaatccattcatccgctgctgatgttgatgctgcttatgggcatcgtcaacctgtttgtggtgcgcaccggcaccccagtggtggcgcttggcccattaagcatcaccgatcagggcgtgaccatcgccgtgctgtatacctgtcgtttcatgctggtcatcattttgggcacggtgtttttgaccacgaccacacccaccgccatgaccgatgcattcgccgcactgatcaaaccactgaacaggcttggcgtccacgctcaggagattgcgttggtgatgagcttggccctgcgattcattccgacattgaccgacgagacccgagccattatcgatgcccaatccgcccgtggaggctccatcgaaaccggttctctgggacaacgaatcaaagccatgagcgcgatcatcgtgcccaccttcgccggaacattacgtcatgcggataacctcagtctggctttggatgcccgctgctatgaggaaggcattcatcgtacgcattggcgcgcattgtccattgctggccgcgatatcgtattcgccgcgctcgtcatcgcatacattgcctccattatcctgctctgacgattcagacagcaccggttgctatgcttcttgaggtatacagcagatgtaaggaactattctcatggcattgaccaagaaacaaatcaagcagctacgcgcaatggcgaattcgctgaagcccctgttctatgtgggcaagaacgatctgaccgaatcggccgtcaagcaggccgatgaaaccatcgagaagcacgagctcatcaagtgcgcggtacaggacggttcgggcctgaccgccaaggaagccgccgccgagcttgccgagcagctgaacgccgaagtggtgcagtccatcggcaatcgtttcgtgctgttccgtcgctcccggcgcgacgatgtggagcatatccgcttggtgcgcgagtaatgttcgccccgctcgaccccgtagcttgatatgagtaatggcggttggaatcagtccgattccaaccgccattactcatattcgcccagtgagcaccgtcactgatccaagatggacccgacgattcccgcaacaatggtcagaaccaaggaccccagtaccgaccaccagaaaccgtgtacgaagacgcccacgccgaacaaactgaccgccagccagctggcgagtcgcatgaacagccaattgataatcaaggtgaccagcccgagagacagaatcgcaaacggcagtgcgatcagatgcacaatcggcttgattgacgcattaatcagcgccatgaacaaagcgaacgcggcgatgccgagaatcggaggctcccccaccggggtcatgccgggagtcaccgcgaccatgacggcggcggcgatagtcataatcaaccagctggtcaggaaacttttcatggcccaatcgtagcgcggcaggttctactattgtgcaaaacgtgagatgatgttgtgcagaaacggtaagaaggtactgccgttcccgattgagaagggacagatccacatgactgatgatcgacaacaaccgtacggtgcggacagtgttccacagcccgcacagccgtcgtacggccaagataccgcacagcagccgcagggctatggcgccccacagcccgccgcatacgctcgacccgccgcatacgctcgacccgccgccggaagctacggccagcagcagccgcaatacggccagcccgccggcgcatacgctcagcctcagtacggccagcctcagtatggccagcccgcacagcccgtagcgggctacggccagcagcccggctatggacaggcctaccagcagccgaatacctacgcacagccgcaatacaccgccgctccgtatgccgccgccccggtgtggcaatcatccaagtccaagttggctgccggcctgttgggcatcttcctcggcggacttggtgtgcacaacttctatctcggcaacaccggcaaggccgtggcccagctgctgctgacgcttgtcggctggattctgctcggacttggcccaatcgcagccgccatctggggctttgttgaaggcattattattctgtgcagcaagcccggctcgccgtggcataaagacgccaacggctacgaactatcagactgagactgacctcgggccacgttcattgggcctctgatcaaccacgcctccgcaggtattatctcgatgccgcagccgccgtgggatgcgacacgccggccgtgtacatgagttcatgtacacctgatacaggcgaatcagtatcgcacgagattcaacagttcctgctgtttggcatagcgggaaacgttggtgagggcgatgcggatgatgtgttcggaagtcttttccaaatgattgccgccggccacatgtggggtgatcaggcaatgcggctcatcccacaacggactttccgccggcaacggctcaggctcggtgacgtccaacccggcaccgtggagccgtccattgtgcaaggcgtcggccaaggcctcgtgatcgatggcgtcgccacgcccggcattgatcacgatggccgtggatttcagacgacccagacgatccgcattcagcagatgatgggtctgcggcgagcgcggcaccgccatcgccaccacgtccgccaatggcagcagtgcttccagccgctcgaagccatacatcttttcaatgcccttggccggcacgtccgcatgacggcgcacgccgaaggtacgcatacctacggattgggcaaactgagcgaaatgcgacccgatgtcgccgacgccgataatcagcgcgatgccaccttccgggctcaataccgggccttcatcctgccactgatgatcacgctgattggaggcataccggttgaggttcttcatcaatgcccacatggtggcgaacatgtgttccgacacgctttggccatacgcgccgctcgcattggtgaccatggtgccgcgaggcagcacacccgggcagatgtacgcatccacaccggcgctgaaggtctgcaaccattcaagacgggtgtattgggaagcctgcgagaccggaaagttgccgatgactgcggtagctcgggagcgaagctcctcgggaacagcggccgaccagaccatgtcgccgcggtgcgcttcgtcgcccacgaattcctgcggcacatcgcgggccgccttggagaaagcgcgccgttctccttcgttgagtggcaggcagttgacaatcagcttatgcgtgttctcaatacccatggttcaccaaactaggcggcagggcggatattatcgcgtgtttcctcatgctgaaccaatgccgaacccgccccgccggaccaatgccgaacccgccccatcaagccccacccaaccaagggacagcccattgcgcatcgaccgtagcgtccgccccgaaccgtacactcacaggtggttttgtgattccatagcgtgcagccaaggcagtacgattgccggtttatccgcacgcacaggtacctacgccggttggtaaaccttacattccatacattgcaaccgaacgtttaggagcatgtatgcctgagcagcatattgataacgagaagattcccacacgtcttatcggcgcgattgtggctgtcggctcacttgccttcattggcattctgaccgaaaccgtgatgaccgtgcttttccccgcactgatgcgcgaattccatgtcgacacggccactgtgcaatggattaccacgatttatctgttggcggtggccgccaccatgcccatcagctcgtttttgaagcgccgattcgcactgaaaaccatttttcttgcggctgtgattctggccatcgttggctcgttgatcatgatcgtcgcccaagccttcccgctgctgattgtcgcccgcattattcagggcattggctcaggcgtggccacgccgttgatgatcaacatcattctggagcagtctcctcgttcgaagatcggccgattgatgggcgtaggatcgctggtcattaccgtggctccggccatcggcccgaccgtcggcggcgcagtgaccacagtgctgccgtggcgcgcgatcttcgtcatcgccattccgctggtgctaatcgcagcattcatcggcatgaagtgcattgagcagaagacaccgaccgaggctgcctatcttgacccgattcagctttggtccattgttgtcgcgctggtcggtctggtgctggcgctgaaccaaggtggcgtggccatcagtgcggcggtgtccggcaagtcagccacacgctccggcattatcgccattgtcagtctgattgtgggcctcgccttgttgatcgtgttcgccatgagttccaagcgtgccttctccccgctgctgcgccttggcattctcaaggatcccgccgtactgttacacgcctgcgcatatctgctgctgccattggtcgccatcggctacggctatgtcatcaccaatgtggcacagctttcgctcggcaccacggcatttgtggccggctctctggtgctacccggcgcactggtcggcgctgtctgtgccccgcttggcggctggttctacgataagttcggcgcggtcaagccgattctgattccgatcggcatcgctattttgggcccagtgcttatgctggtgttctcgatgcagcttacgcccgtgctgctcgccggattctatttcattttcggtctgttctattccatcggcaatgcgaatgtgatgaccagtggcctgtcggaggtctctcccgggttcaagccggacggcaacgccattttcaacacgtgtcttcagtttggcggcgctgccggtaccgcactgttctccacgattctttccgtggctcaggccggcgcaggagaagaaggcaccgctgagtttgctcatgccactgccgtcggcggcacatggacgtttgccacgatgacggttatctgcctgattggctggtgctgtctggccaccgcgttccgcattcgcgcctcacgccggtgcgcctaagaccgtcagtccgcggcccgcgacgcctcccgcccggattcgtcaccgtgcagtatcgtgcggattcggacgagacgctggctgacttcgtgttcgtagccgcgatcgttggggtggtagtactcggtgccacgcagctcttcgggcatatattcctgcggcgccacggcaccgggccaatcgtgcgcatacttgtagccctcgtggttgccccactctttcataagcttggtgggggcgttcctcaaatacagcggaacagcgccgatcttgccggcatccacgtccgcgagcgcctggttgatggcgttatagctggcgtttgatttgggcgcggtggccacggcaatcgtggcttcggccaaaataatacgtgcctcaggcatgccgaccagcgccacggcctgcgccgcggccacggtgacctgcaaaatctgcggggcggccatgccgacttcctcgctggcggcaatcatgatgcgacgggcgatgaagcgcggatcttcacccgctttcagcatgcgcgccagataatggatggcggcatccggatcggagccccgcatggatttgatgaacgcggaaatcacgtcgtaatggtcatcgccgtctttgtcgtagcgcacggtggcggtgtccattaccgtagccacgatttcgggggtgatgatgggtcggcgtgcgcccttttttcgggcttcgtcgccggtgaccgcgccagccgcggcctccagaatcgtgagactcttgcgtgcgtcgccaccggccatgcgcacgatatcggcgatggcttcgtccgtggctttgacctcacccttgagaccgcggtcatcagtcagcgcgcgctgcaccagttcggtgagctgatcagactccaatgactcaagcttgacgaccaccgaacgggagagcaacggtttgatgatggaaaagctcgggttctcggtggtggcgccgataaaggtcacgtcgcggttttcgacggcgggaagcagcgcatcctgctgggatttggagaagcgatgcacctcgtcgatgaacagtacggtttcctggccgcgtgacacgagccgttcgtgagcgcgggtgagtacgtcgcgcacgtctttgacgccggatgtcacggcggagagttcctcaaacacgcggccggattggccggccacgatggtggcgagcgtggttttgccgacgcctggagggccgaacaggattacggagctcggcgcggtgagactgcctttgctggccggattggcgaggcggcgcagcggcgagccctggcccaacacctgcgtttggccaatcacctcgtccaaagtgcgtggacgcatgcgcaccgccaacggccgtgtcatcggctccggcgcatcagccgccccaaacaaatcgttctcactcataacgtcctatagtaccccagtgttcgaacagacgttcgagctacaccttagcttccctcagagaggggagccaagaaaggaatcagttactcaccttgtagtcatggaagactacttcgccggtgtcttgggtggcgtcgaggtccacggtgccttcgatggcccagtcgtgatcgccatcggaatcatcgataatctgacgcaccttccacgtgtgttcgtcgttctcatgcttgctgtccagcatgaagagttcgggcgagcgcgcttcggcaccgatgcccacatactcgtgttcgtcgtagtagtcgtcgagcacgtcctcccattcgtgcacgccgtagccccaatccttgtcgagcgcgcccagcttgtccggctgatcgagatccataagctgcacacggcggaacaaggcattgcgcaccagcacggtaagaccacgacggtcctcgaccaccgcgctttttgcgccgggcgcggccagggatgccgcagcctcggattggtcagccgagtcgccggcattctcccattcgtccaccaacgaggaatcgatggagcgtacgagcacgcgcagccacgaaataatgtcttcgagctgttcatcgcgcttttcgggcggcacggtgcgcgccaatgtgcggtaagcgtccgacaagtaccgcaacagcgtgccctcggaacgggcgatgttgtagcgggcgatgtatccggtgaaatcggaggcggtttccaccatgtcgcgcaccacggattttggcgacagccagtagtcgttcgcccacggcacatcatggcgatactgatcgaatgcggcctcgagcatgtcttccagcggcttgggataggtgatctcctgcagcttgtccatgcgctcgtcgtagtcgagtccgtcggccttcatgtcggccatggccttgtctctcgcctgacgctcctgcgcacgcaacacctgcttggggtcttccagcgtggcttcggccatcgagatgacgtccagcgcgtaggtgtccgattccggatcgagcaactccaatgcggccaacaggaacgggctcaggggctggtcgagcgcgaagtcatccggcatatcgagggtcatgtaatagtctttgccgccatccgcacgatcttcggtctcaatgacctcggtatcgaacaaagtgcggaagatttcatcggcccgctggtgcagatgttctttctgatccggggtctgcgctgaatcatcgataagatcgtcgatacgagcacgcgcatcgccgccttgcgccacttcattgagcaccatagaatgcgtgatcttcagatgcgggaccaaggtttccggagcggcgtcgatgagcttgttgaacgtgccttcgttccaggtcacgaagccttcgggggctttcttgcgcttgaccttcttgagcttcttcgggtcgcctccggccttggctatggccttctggttctcgatctcatattcgggagcctcggctaccaccagtccttcggtgtcgaagcccatacggccggcgcgtccggcgatctggtggaattcgcgggcgcgcagacggcgcatcttggtgccatcgaacttggtcaacgcggtcagcaccacggagtgaatcggcacattaatgccaacgcccagcgtatcggtgccgcaaatcaccggcaacagaccttgctgggcgagctgttcgaccagacgacggtatcgcggcagcatgccggcatgatggataccgacgccggtgcgcagcagacgttgcagaatcttgccaaaagccgtggtgaatttgacgcctttgatggcttcggcgatggcctgacgctgttccttgctggacacgccggtggaggcaagcgcctgcgcggtttccagcgcggcgtcctgagagaagtgcaccacatatatcggcgtctcgccgttgcggaaggcgagttccacggttctttccagcgggtcgagcgtgtactcatagctcaacggcaccgggcgtggcgcatcggcgatgacatccacatcaggtgtgtcgttgagatcggagagcttgtcggcgatggcatccacgttgccaagcgtggcactcatcagcaggaactgggtttgcggcaaggtcagcagtggcacctgccatgcccagccacgctccgggtcgccgtagtagtggaattcgtccatggccacgaggcccacgtcggcatgcgtgccctcacgcaaagcctggttggcgagaatctcggcggtgcagcagatgatcggcgcgtcggcgttgatatggctgtcgccggtgatcatgccgacattgtcgcggccgaacacctctaccaggtcgaagaacttctcggagaccaacgctttgatgggcgcggtgtagtaggaacggcgaccggtgcatagggcggcgaaatgcatgcccagcgccaccagtgatttgccggaaccggtaggggtattcaaaatgacatggtcgccggccaggagatccataatggcctcttcctgatgcggccacggctcgatgcctttgacctcttccacccagccgaagaaccgttcgtagatatcatcggccgtaagattccgctcgcgctcgtcgccgtcccattcgggagccaaacgccccagggaaccatattccttctcgtcagtcataatgttccagtctacccagcggcctgttccagcggcgcgaaccaccctccgctgcttcgcagcacctcccaccagcgggaggaatactcacgccagtctgcgacggacctcgtcggggtcgacttccggttcgagcggcggccaagtcatattcatattcttcaacgtggtgcgcaacagctcggagaccacggcgcgtgaataccaccggttgtcagccggcaccagataccacggtgcggcggcagtgctggtcttctcaaaaacctcctgccaggcgtccatgtagtcgtcccatcgattgcgggcttcaaggtcggagatatcgaacttccaatatttggtggggtcatcaagacggccgagaaaatgctttttctgctcatcctggctgaccacgagaaagatcttgagaatcgcacatccgctggcggccagctcacgctcgaattcgttaatctggtcatatcgggcacgccatacgtcttccggataggtgccgtagacgtgcggcatgaccacatcctcgtaatgggaacggtcaaaaacggcaatccagccctgcttgggcagttcgcgcttcacacgccagagaaaatcatggtcaagctcctcggcgcctggcttgccaaagccgtgataatggatgcccataggatcgccctggctgaatacatggcgcacgatgccgcctttgccggaagcatccatgccttgcaacacgatcagcaatcttcgcggggagcctttaacaccgttggcatacatgagccgctgatatcgggcgatttcggaggagctgatggatataaaccgttccgcatcctctttgccgccatcaaaccccggcgtggagtcgccttcgacatcagtgacctgcgtccccgggtggaacatcagtcgttgtgctggcggcagagaccatacggcactcagcagttcgctggatttcgccgcgcgggccagccgttcggacacggtggtgctggattcaatgctttctatgcggtcttcggcgagattcagcgtccagtcgatgcgtttatcgccctttcccctgctgggcttatccttaccgtttttgtctttgtcggatttgacgacaccacccaacttgccgtttttacccaccttatttgtctttccgtcttccttggccatgccaccgattgtacgcttcgccggattcgcgcgtcccggacttcaccgacggcttggcctcataggacttcgcgagccacttgcgcaagcacatccaccgatgcctcgaattcctcgggcgtggtgtaggcatagctcaggcgaagggagttgtcaccttcgaaatcgtagatgtcgccgggattaagcagcacgccgcgcttcaaggctgcttggaacaggcgactggtgcgcaccggctgttcgaaggtcagccacacatagaatccgccatccggccggctccagtgggcccggcccaagaaatgacgctccagggattccatcgccgcatccctgcgacggtgtagctcccgtttgaggtcaaccagataccggtcatacagaccgctggtcaagaatcgggcgaaagcccactggctgagcagactagcgccgtagtccatctgcattttcacatcagcgagtcgttggacgattggctcattggcaataatccaaccgatgcgcagtccaggagccaacgatttcgaagcgctgcccaaggtgatgaccatgccggtctcatccatggtcttcaacggcttcggcatctcgtcgccgaaatacaggtcctgataggcgttgtcttcgataatcggcaatcgattcgccacgcagcagtcgatgaggtcatgccggcgctgattagtcatcgtcacgccggtggggttgtgattggtgggaatggtgtagagcacggcatccgcgcccttgcccgatacagcacggtattctcccaatgcatattcaagagcgtcggcgcgaagcccctggtcgtccatcggcacgccggacaagcgcattccggccgattggaacacctgcaatgacttgatgtagctcggagcttcggcgaacaccgtgcttcctgcagacagcagactcacggaaatcagctgcagagcctgcaacgcgccggaggtgatcagcacctgggccggcgtgcagttcacccccgagcggcacatatgcgcggcgatcgcctcacgcagcgcggtcatgcccgcaggaggcggatagcccagcgaatctatctcctgcgcggcttccgtcagcacctgtttccacatatcgcgcgggaacagtcgcggatccagctcgccggtgcccagtcgtgcgatattcggcgcgaactccatgcgattgatggtctgtatcgtggcgttgttcgcttcaaagaacccggaggagacgtagtcggcccagtccggggcacccggcaacatcaatgaccacgtattgctgacgatgcgcgtaccagcgccatgcaggccttccacaataccgtaatcggccagttcagttatagcggcgataaccgtggaccgattgacgccaaacccttctgccatggctcgctgcgagggcaatcgggcaccgatcggccatacgccactggaaacctgatgacacatgtagtccacgatttgctcggtgaccggcacattcgacgtgcgatccggcttccagtcgataaccaacggcgctattcgtgccatacctctcctcttcctatgctgcgagcgcagacccgcaatccgcacaactaggattacgccaacgtctcatgcccatatccacatgtttggttgagcgacaatgctgccatttggctggttgtcaaccacaatccactccttagaataatccacggaaacatgaagatgcacggttttattgaattattacgcgcatcgcgctcagtcgcacaatatgtttggctgggtcagacatgaccagccaaacacaattggctggtatttaagggagcagagattcatggggttctacttgcagggactgacgatgggactggcatacgtggcgccaatcggcatgcagaatctgtttgtcatcaactcggcactgaccaagacaagacgcaaggccgtgttcacagcaatcatcgtcaccatattcgacgtggcactgtccctgtcatgcttctttggcgtgggcgcactcatgcagcggtatgagtggctgcagctggccgtgttggctgtgggaggtgcagtggtaatccgcattggattggggttgatctttccgggattgttccgccatggcaatgactcgacatcccacagcaccgcatcgaccactgacgctgagatcacggacaagcgagccgacggattggcgaaaaccgtcactactgcatgcgtagtcacatggttcaaccctcaggcaatcattgacggcacgttgatgctgggcgcattcagcgccacattgagcgcttcgcaggcatctccattcattattggggtagaaagcgcatccgcattgtggttcttgggactcactttggtaatttcggcgttcagccagcggttcagcccaaagatcatcaacacgctcaacaaggtgtgcggcagcatcatcgtactctacggcatcaaactgctcgtcgaattcatcatggccgtactgtagacgattcagcgcgcttcttttcgctgcgttttcccattacggccttggtcgcgccggcaccaagtatcgtgaccagcacgccggcgcccaccatcaatgctggtcgttgggcggcatgtaagacggcaaggtcggggccagctgagacggagctgttctcaccggctgcgctatccgacgcagggtgtttgccgatgttggcatattgggcattgatcacgctcggaccggtgaacgtcacatgatcggcggtttcgactttggacacatcgccgttcttgtctaatgtgacgcgggcgcatagggccttggcccagttgatgcgctgccagccatcgctggattgccacaatgggtagccggagtccaaggcagtggctttgagaatcgcattgcgctgatcagcgtgcagttcgggataggccagtcgcagcacgtccgcggcaccgcgtggggccatgaaatcagcaccggattgggaggtattctgcggaaatgtgtaggtaaggcgcgcggtgtacacgcgtacggcagaggcctgatctttgaccggttcgctggctacggaatcaagaaaaccgttcgtgtaaccgcccgcgccattggctttgacattggcgatacaagcggcgagtgtgcttccgtgttcgtccgcctggcatcgctcggtcaggtagccgcgcaactgacgggctgcgggcacgatggacgatctgaattcattgtgccagtactgcccgttttgggcggaggcgccgatgcgcccgcccatgatgtcgagcggataatgcacacccagaacaatgcggttattgccggcctccgaagtgcgggccatgatttgcggagccagttcgggaatcatgccggccaatgcgataccccacgaataggcgccagtagtatgcccggacggataggagctgttcttttgcaggttcgagtagccgggcacgtgctcaagccatgagggcgactgtttgatatccagtgtggcgggaagcccggcaagatcattggtgccgccaaagctgctctctgcacggttcagatacggtctgggatgcatggcagcgcgtttggaagcataggtggatgccacattgaaggagaacacatcggccacggcgttgagtttgccctgcttgaggccttcgctcatatatgcgccgagcactggtccgagcgcatccggcatggtctcctcggcttgcagatcggaatcgacaagggctcgtttgcgctgagcgttgagacccttgttatcgaggtcttctgcggctttgtgattgatcgccacggcgagattctggtcaagctccatcgttttggcgtcgagtaccttgccaccatgcgcggcatcggtaggcgcctgccaataatccttctcatagtcggagagcaatgccacccagtcggggttgggcagccggtcggcttgtgcggcgggaaccggcatggccaccagtatgagcggcatcagcagcacaataacgacaacggaggataggcgccggaacatcttcatatgttccaacctatcctccgttgaggctacgtagccgagtctcagccaaacacttagtaaattcttcgtgccggctaagcggtggctgagttgtgtcaggtttctggtttgtcttcagacttcagaaatgccggaaactcgccggtgtttggatcggtttgcgattcgggatgggtgacgtcatatccctgttcgtaccgggtgcgacgccaattgcggatcgaggcattggtgccgcgatgatgcacgtgatacttgcgcggtgcaccgccgaacggcagctcctcaacttccttggccactgcaatctgattgacattggacgggtcacccgcggcaatcggagccaacggttcaggttcggtgggcgcggccgtacgttgctgcatacgtgaaggcaaccactcggccaggcgagagagcagccagcaggcgacgaagtaaatcaccgcggccatcaccagcgtttgcaggatgttgaagtacatcgagccgagtcggcgggattcctgcagcagatcggtgtacatgatgatcgagcccagtgcggtgtccttcagcgccacgaccagctgggtgacggcggccggcagcatggcgtagacggcctgcggcacctcgatctgaatcagcgactgcgtttcggtcagtcccaaggcgagcgaggcctcgcgctgaccgcccggcaggttgccaacgccggaacgcactagctcggcgaccaccgaaccgttgtacagcaccagggccagcaccacagcccaataggacgggctgggcaggcccgcgaaggcgaaccatcgccagaagaaaatcatgagcagcagcacggggaccgcacggcagaactcgacgatcacggcggagatgccacgcaccaacgggttcggcagcaatcggcccacgccgaataccagaccgaacaccacagctcccaccacggcgagaacggtggccttgatggtcatccataggcccggcaagtagaagtcagtccatgcttcacgttcgacggcgggcttccacagttcccagctcagctggttctcgccgtcaggcggattgtgcagacgcataagcaccaacaccagtacggccacgaatatgagggccgcaatccagttgacgatacgaatagtgcggcggcccttgggaccgggcgcatcgaagagtacggaattcgaggtatcagccatatccgtcacctccttacggcgagcttgttggacagatacgtggtgagcatgccgatggggatgatcagaatcacgtagccgagtgcgaagatcaggaagatctggatgatcacgtcagggcggaattcaatcatctcgctcatcagcgaagacgtctcggtggccacggatgcggcggctgccacggtggagttcttgagcagtgcgatcagcgtgttgccgagcggcgccacagaaccgcggaaggcctgcggcagaatgatctcagtggcggactgcatgaagcccagacccagcgcgcgggcggcctcggcctggcctagcggcacggtattgataccggagcgcagcgattcgcatacgaatgcggccgtgtacaggctcaggcccgtgactgccagccagaagaagttcgtggcgaaggtgtcggagaagctgagcttcagctgcgcgtaggcaccgagcaccatgaataccatgatgatggtcagcggcaggtttttgaacagttccacgtaggcaccggccacggttctcagggatgagatcggcgagatgcgcatgacgacaaggatcacgccgagaatcatggagaacagcgcggaccacagggtcagttcgatgttgaccaggaaggcgccaagtacgtcatactggctgaagagttccaggaatccgttcatcagttcttctccccctcgtctggagtgggcgggttgtagcgcacgtcgggcgtgtagttggtgcccttggtgttgtcgctgatggcgttctcccacgagccgtcttggatcatgtccacgatggcgttgttgatcttggtggccagctgggtgttgccctttttgatgcccacgccgtagtattcctgtgtgaatggcttgccgaccaccttgagcttgccgcgcgaggcggaggccaggccggccagaatgatgtcatcggtggtcacggcgtccacgatgccggagaacagtgcggtggcgcattcggcgtaaccgggctgctccataagctggacttcggaggcgaacttctccttgacggtggcggcggaagtcgaaccggtcacggaacagagccttttgccattaaggtcttcggggccgttaatcgaattatcatccttgcgcaccagcagatcctggccggccacaaagtatggaccggcaaaagagacggccttcttgcgttcgtcggtaatcgagtaggtggcgagaatcatatccacgtcgccgttctggatcatggcctcacgttgcttggagggagcttccttccagatgatttcatcctcggagtagccgagttttttggcgatgtacttggccacgtccacgtcgaagcccacgtaggtgccggacttcttgaagcccaagccgggctgatcgaatttgatgccgatacgaatcttgccggactcatcctgtccgcaggcggccagcgacatcgtgcaggccacagcggcgagcgcggcgaccacgcggcatgccctccgtttgaatgtattggtgaatgtcatatcgcaaacccccgtgtctcagtgggtgaggatcttcgaaaggaagtccttggcgcgttcggtctgcggatgctcgaagaactcgtcaggcgtgttctcttcgagaatctgaccatcggccatgaacacgatgcggtcggcggccttgcgcgcaaagcccatctcgtgggtcacgcaaatcatcgtcatgccttcgtgggcgagctcgaccatcacgtcaagcacttcgttgaccatttccgggtcaagggcggaggtgggctcatcgaagagcatgaccttaggccgcatggcgagcgcgcgggcgatagccacgcgctgctgctgaccaccggaaagctgggacggcatcttattggcctgtgaatcgacacccacgcgggcaagcaaatccatggccagctgctcggcttctttcttgtccatgtgacgcaccttgatgggcgcgagcgtcacattctcaagaatggtcttgttggcgaacaggttgaaggactggaacaccatgccgacttcggcgcggagattcgcgagctccttgccttcctgcggcagaggcttgccgtcgatgcgaacatcgccggaatcaatggtttcaagcctgttgatggtgcggcacatcgtggatttgccggagcctgacgggccgacgaccaccagcacctcacccttggcgacggtcaggttgatgtccttcaggacgtgtaaatcgccgaaatgcttctcgacgtgggtcagctcgaccagagggcggttcagatcctcattaccgggcaccagaggagccagaggagctttgccttgggattcttctcgcgtcgtgcgcgaacgtactgctgtttcattgttcgtttcagacatgaagaggagaatagcatacaagggtttccaatgtatacacaataatggatgctcaaccgcgaggtttactcaatgcggagacgaactggacgccggggatatcagcgaaaatggagccatcgaccaccagtttggacggacgaacgccagatcccaaatacagtttcggaatcgacagaatgtgctggtccaccagcaacggccagtcgctgggcaaacctatcggcgacatgccgccggattccatgccggtggcctccacggccgcgtcgatcggcgcgaaactgactttggagacctccagcgtgtgcttgaccacgccgttcagatcggcgagggtatcggccgtgacgaatgcggcggcgaagtccggcggcgccttgcggtttttgtgcgtgtgcacgaccaccacattgccggtgatctcgaacggaatgccgtatttcgggcaccacaggtcggtgtccgattcctcgtccgcgttgatggtcacgcccagaatcttgctttccggcacgcctgccgccaccagcccattgagcttgtcgaacaccggcttggccagcagatccccatcatgccaatccaaaatctccaacgtcatatatgtctcctcttttttcggacatagtgaccctcagaataacgaaagcgccagcggcacatgccactggcgctattcgtattacctatgaagcgctatcagtcttcgaaaatgaatctacgcgtgcgaaaaaccgccgtccgaagccgaaggcgcactgaggtgcgtcgagtgctgaggaaaggcggtatacgctccgtagattagttttcgtcagcgtccgggtcgtagtcgacgccggtctcggcgcgctgctcgtcggagatcggggccggagcaccggtcagcgggtcgcggccgccgccggccttcgggaaggcgatgacgtcgcggatggagtcggcaccggccaggatggacacggtacgatcccagccgagggccagacccgcgtgaggcggagcgccatacttgaaagcctcaagcaggaagccgaacttctcatcggcctcttccttggtaatgccgagaacgtcaagcacacgagcctggatgtcgtcgcggtggatacgcacggaaccgccgcccatctcctcaccgttacagacgatgtcgtaggaatcggacatggcgtgctcgggatctttgtcgaacttgtcgatccaatccttgctcggcatggtgaacgggtggtgcatggaggtccacttggagtggccgacagccacatcgtcgtcgtccggatcatcggtgggcttgaacagcgggaagtccacaacccaagtgaaggcgaacttcttcggatcaagcaggccctcacgggaggcgagttccacacgcacggcaccgagcagcagctgggaggattcgcgggaaccggcggcgaagaacacggcatcgccttcctcggcaccgacggcctcgcgcagaccgttgcgctcttcatcggacaggttcttggcgacggggcccttcagctcgccgttctcgccaaagaccacgtaagcaaggcccttggcaccgcgctgacgggcccaatcctgccatgcgtcgaactgacgacgcggcgtggcggcaccgcccttgaacaccacggcacccacatacggggcctggaacacgcggaacggcgtgttcttgaagtagtcggtcagctccactagcgggttgccaaagcgcagatccggcttgtcggaaccgtacttgtccatcgcatccttccaggtgatgcgcggcagcggcagctgaacctcatagccggcggacttccagatggcggcgatgaccttctcggtcatggccatcacgtcttcctggtccacgtaggccatctccatatcgagctgggtgaactcgggctgacggtcggcgcggaagtcctcatcacggtagcagcgggcgagctggtagtagcgctcaacgccggagaccatgagcagctgcttcaacagctgcggggactgcggcagggcgtaccaggagccaggcaccagacgggccggcaccacgaagtcgcgggcgccttccggggtggacttgatgaaggtcggggtctcgacctcggtgaagtccatgtcctcaagcgcatggcgagcggccttggccatgtcggagcgcagcttcaggttgtgctgcatggacgggcgacgcaggtcgaggtaacggtacttcaggcgcacgtcctcgccgggcagcttgttctcggactcgttctcgagcgcggtggacacctggaacggcagggcatcggccttggcgagcacctcgatggattcggccacgacctcgatcttgccggtggccagatgggtgttctcgttgccgtccgggcgcagacgaacgtcgccggtgacctgaatcacgaactcgctgcgcagcgggcgggccatgtcctcgtcgtagatgacgacctgcaccagaccggtggcgtcacgaaggtcgatgaaggccacaccaccgtgatcacgacgacggtcgacccaaccggcgagggtgaccttctggccgaccagggcctcggtcacttcagtggcatgatgtgttctgtaagccgtctggctcattgtcttagttctcctcgaattttcgcgcgaatacgtcagatttcgacggtttgctgggcaaccacagtatccggttcccacgacgtgcaatcggcggcaacctgctcgccggtgacgatgttcttgacctcgtcaccggttgattcctcaccctcggcggcactggccgggaaccacacgtacgggatgccgagcttgtccgcatacttgatctgcttgccgagcttggcggcggtgggtgccacatcggtggcgatgccacgggcacgcagctgggcggcgatgcgattggcggtcggacggtcctcttcgttccacacggcgaccagcacagcggcagggctcacacggttggcgtgcgcgccggcggtgtgcagcatgtagctgaccagtcggctcaggccgatggacaggcccacgcccggatacttgcggttgccctgggaggcgaggttgtcgtagcggccaccggagcagatggaaccaagcgaggcggcgccgtcgaggaaggtctcgtagacggagccggtgtaatagtcaagtccacgggcgatcttcaggtccgcgatcacggagccggggcggatggcggcggcctcgtcgacgatcatggccagggtatcgagtccctgacgggccagcttataggcctcggaatcctcggcgatgccgtgcgcctcgcacagcgcgtcgaacttggcagccagctcggcaccatcggaggcggtaagctcggccagttcgaggcaggcgcgcgcctgggcctcggtcgcaccgcaggtttcggaaagtagtcgggccacctcgtcggcgccgatcttgtcgagcttgtcgatctcgcgcagcacaccttcgatgtccgtcagaccgagtccacggtagaagccttcggacagcttgcggttgttggcatgcacggtggccttgggcaggccgtatgcgcgcagctcttccaaggcggaaaccatgaccagcggcagctccacctcatagtggtcaggcaggtcgcccgcaccaatcacgtcgatgtcggcctgcacgaactcgcggaagcggccctcctgcggacgctcaccgcgccagaccttctgaatctgccaacgcttgaacgggaaggtcagcgcacccgagtgctcgaccacataccggctcagcggcacggtcagatcgaaatgcagacccagacggtcctcaatcggagtgtcggattcgtgaccgacctcctgcagacgggaaagcaggtagatctccttgctggtctcgccttttttcagcaaagaagcgccggtttccaccgctctcgtctcaatgccgatgaagccgttgagctcaaaaaccttacgaagcgtgtcgataacacgctgctccactacacgttcggaggggagccactccgggaatcctgatattgatgcacctttagccacgaaatcaatataataggtgagggttgcgtcaaagcatgccgaattatcggtatgcgaggcgttcccactcactcactctatgcttgtaaggagctggccatggccgacgagactgtcaccgaaaccgaaaacaccgctgcgaccgaagagcaggcaacgacacccgcacccgaggccagcccggccacaccgactcctgcttcaatgccgaagccgcatgcgcactcccccgccgctttcgctaagaaggcccccgcggccaaggcccacgttgcggccccggccgcgcacgccgcatactccgacgccgacgtcaaggccgctgaagccttcggccgcgtggacgacaacggcaccgtcttcgtcaaggagggcgacaccgaacgcgaggtcggccagttcccggacgcctccaaggaagaggccctggcgctgtacgcccgtcgtttcctggatctcaaggccaagcttgatctgctggccagccgtctgacctctcccaatgtcaaagcccgtgagatcgacgagtccctgaagctgctgggcgaggagacctccgagcccgcagtcgtgggcgatgtcgccgcgctcaagaaacagttcgagacgctgaagaccgccggcgaggccaagaagaccgaactgtccgaggcccgcaaggccgccgtggccaaggccgtcgaggaacgcaccgccatcgtggagaaggccgaagcactggccgcctccctgggcgacaacaccaactggcgttccaccgcggacaagttccgcaacctgttcgatgaatggcagaatcaccagcgcaccaccatccgcatcgacaagcccgaggccgaggcactgtggaagcgcttctccgccgctcgcaccacattcaaccagtcccgccgcaagtgggcgcaggctcgcgacaacgagcgttcccaggccaaggaagccaaggaagccatcatcgccgaggccaacgagctgaaggattccaccgcctggggcgagacctcccgcaagttcaacgagctgatggaccgttggaagaaggccggtcgcgccggccgcaacgaggacgacgccctgtggtccaagttccgcgaggccgccgacactttcttcaacgcccgtcaggccgaccgcgatcagatcaactcctccgagaaggagaatctggccgccaaggaggcgctgctggtcaaggccgaggctttggtgccggtcaagaccgacgcggaagccaagaaagcccgtcaggagctcgccaagattcaggaagagtgggatcagatcggctacgtgccgcgtgacgccatgcgtcgcatcgagggtcgcctcgacgccgtggacaagcaaatcaaggccatcgaggatgccgcctggaagcagaccgacccggaggccgatgcccgtaagtccagcttcgaagagcagcttcatgctcagctcgccgagcttgacgagaagatcgccgctgagtccgacccgaagaagaaggccaagctcgaggccgagaaggccaccaaggagcagtggctgaacgccatcaagtaagccttccgcttatgcccccgctggcgggggctgtccaacatagtcggactgggagtggttccatacaacggccacccccagtcgacaaaccgacagcccccgccagcgggggcaaatttgtagctgctggccccgccaacgagcggggctcattcatatctatgcccgtgtgccggtttcaggcacggcagcagatagcttcgggtgcgcagccagatattcgtgcagcgactgggtataggacatttccagttcgccatagttgctgcctgcacggaatgccgaatagttgtcgccgccctgcagcaggtaggagttggaagcgatgatcaccagatcgtcgtcagcgatcggcctgccgtcgatggtgaggtccacgatgccgacggtggccttaacccctgtatgctggttgccgtttccgtcggaatccccgagtgtgcatgtggcgccaccatctccgcactggacgtaccggtatcgcacattcgaggagatgccgagccatcggtgttccaattcaccgtcatcgttgcgatgaaactgctgggcgagcaccgccttgagtccgagtccggtgagggtttcgtgcgcggcgtggaactggagggccatcagactgtcgacctcacgaatcgtgaccttgccgtcctcgtccatatccagctgtttggttctcaggctgccattgtttgagaatccgaccacgggcaatcgggtgccggcatacacattccgcatgatcgactcccggttggcgtccgccacaagcatgcccaccgatccttcatgtccgacggacgtgcgcttgtcgaaattcgttcccggcgccagagtgccgatcaccgcgttccccgcactggccgcgtagtccttggccttcgtgtagagctgccgcgagcgcgctacgctgccgttcgacaccacgccggcggacatccaggcggcctgacgcggatgggcgtccagcccctccacgttgagcacgcccggaaccgcagtggcctcggtgccgttgccgaggttcacatcggccacctgaaccttggcatgacgaccatggccggtgatgatcagatcctgcacggccatgttctggccgaagctaccggcctcatagatcggtgcccctccgtcggcgacgccttgttttacggcgtgggtgtggccggtgtaggcgaggtccacatcacgtccgagaccggttgccgccgaggcgtcggcgtgcaacaatgcgaccaccgcatcgactttgcccgaacgcttcagttcaccggccacgcggttgagcgcgtcgacggcacgttcgctcagatcggcgtcttcggtgatctgcggcgtggccaccgagccaagcgcatccgtgagcgcgcccacgaaaccgatgcgcttgccattcaccgtgcgaatcgtatagtccttgacatggctcagtttgccggtagctgatttattggccgaggacacgttggcgcagagccagtcgatgccgttggccggagcggccacacgattgttgaagtcggccacgctgcgatcgaattcatggttgcccacggcagaaaccgtcagcccccacaccttggccatgtcaagggtgggtttgtcttgcttcacggccgactcatagggcgatccgcccaccagatcgccggtggagacgggaaccatattgtcggggttgtgactgtccgccaaggtgaaggcggccgcgacatcggccccatgttcgatatgaccatggaaatcggtgatgtcggcgatggtcaccgtgcgtgtgccggtggccggatcctcgccggaaaaaggaacggctcctgcagcacccgcgatattgggtgccacaagagccgtcatcatgatgagcgcgacgatgacgcccatcgttctgcgatgtctgcccgccgtgaaccggcggcggttcgtgtccctgttcacgctttcacggtaaacgcgcaggttgaaccgcatgggcttcgcatttggccggcagatgaattcccggttatttccgcccacagcgtctggccgaatcgggccgtcttcgttggttcggcggtgccattcgccaagctcggcggcgcagatggcggccacagcggcgtgttccgactcgcgggagccgaagcacgccgactcgtttgaccgcccgatgggccttagacgggccttattcgctggcgttcagagacatacgaggagccatatgctcggcgaagaagctcagcatcgattcgacggcctcccgggtctccttgagccaaggcatgcccacgatgtagttatggggcaggcattcgcgcgaagcggcacgatagtccagcaactcatggtcgatgcccagcttgcgcagctcgacacccagttcgaggctggtggcttcgaggaagtcatcagtgctcgtggccatccagaccggcggcagaccagcattcacgaccagctgagcgagcctttcgaacttcgtccccttcacacgctcaacatagcgcgtgaaacacggagccagctcctcgacaagcccaccggcatcataggcgttctcatcgaacagccggtccagatcggccatcgcggatttgagacccaaggccctcagaccaagcttcgcgggatgcacgtcgagcagggaagcatattcgtcgttgttcatggcggccgtcagatgcagcaccaaggtcacacccgccgaatccccggtaaagaaaacctggttcgtatccagcagatacctgccggaggatttcgacacccactccaaggccgaggccaagtccctcagctgcgtgaggaagtccaccgcgggatacaggggatagctcacggacaccacggcatacccatgacgggcaagctcgatggcatgcgagcggttaatctccttgaagccatagaagtacgcccctccatgcacctcgaagatcaccggaacagccgctccgccacggaccacggcatcacggggcaacagcacgtccaacaggtgcccacgcgtcgcgtccggcagatatgggatgtcgccatacagcaccacatcatccggaatctcacgcttgaatgcataccgaggcaggtcgttatgggcaaaattcgtacgatgctggagcacgtcagcagcgatggccggatcgacgccctccaaatcctcgtcgaaatacgtccaagtttgcgcgaccttcttctgttcttcggtcagaccgtcgttgcgctcgaaaaggaatgcgtcggcgccttgcagatcggtgatcatcaaatctccgccttcatatcctcaagctcaacgccgttggtctcgggcagcttcttggcgatgaaccagtatccgaggacggccatcacggcgtacagggcgaaggtccaagtcaggccgaggctatcacgcagcggcgggaaggtggtggaaacgaggaagttgccgatccagttggcggcggtggccagcgccaccgcaacggcgcggatgcggttcgggaagatctcgccgatgacgacccacatcgccacgccccacgtcgcgcaataggtcaggaagaacccataggcgccgacaatcatgatgatggcccacgcgccgggcagctcgatgccgccatcggcggtcatcgtggattgggcgaagcaaacggccaccacgaccagaagcacggccatgatcagggacccgaccttgagcatggcgcggcgaccgaccttatcgatgatcagcatgccgagcacggtgacggcggtggccagcaaagcacgcaccacagcgatggtcatagacgcggactcggtgaaaccgacagccttccacaggctggaatcgtagaacatgatgacgttcgcgccggacacctgctggaacagggcgacgccgatgccgatccataccacggatttgaggccgaaggtcttgccgcgcagatcggagaccttgggctgcgtctcgccttcgaggctctgggcgatctgctcgaccgtcgcggaggcgttgcggtcgcctacgacttcgagaagcaccttctcggcgatggccttcttgcccttcatcaccagataacgcggggattcgggcagcgcgaaggtgagcgcgaacatgatgacgcccggaacggctgtggtcatcagcatccagcgccaagtctcgagtccggcccagaacgtcacggcggcgccgcccgagccaagaagataggagtcattgaccacaagggaggccacgatgcccaaggcgatggccatctgttggaagccggtgaggaatcctcggcgtgacgacggcgatatctcggagatataggcggggccgatggctgaggtgaatccgacgccaagtccgcccacgatgcggaagatcacgaacacccagatattggacgccagaccggtgaacagggcgctgaatacgaacagcgcggcggcaagctgcatgacgcgcacacgaccgatgcgatcggccagcgtgcccgcgaaccatgcgccgaccacgcagccgatcatggcgctggacaccgagaaaccgctcatggcggcgttcaacccgaagccggagtcggggctggcgatggcgtccacggcgccgttgatgaccgaggtgtcatagccgaacaggaaaccgcccacggcgccgatggcggcgacggtgatgagcttggcatgcagtttcgttggcacttcattgttttgattcatggattgcctcctttgcctttcatgaacctggttcgatgatagaagcaattcggcgggatggcatcggtggactgtgacctatcagggacaaagtgtgacctatggtgtgacgccttcgtcacagagccaccagttggaagacgctcacaacgaatccgttcaccggcccttcttcgaactggtccgtcaatcgtcatcgcagttgtgcgagagctcgatgtcacgccactgcccgggcgtgagaccaaatttacgctcgaaagccgcttggaaccccctttcattgggaaaaccagccacccgtcccacttggccgatgtccgcatcgggcatgcgtagccgttcgcaggccactttgagtcgtaactcattgacgtaatccataaacgaagtgcctgaatattttttgaaaagccgggagaaatactcacgcgaatatccgaagtgccttgccgcttcgctggtagtgatggacgaaagaaaatgatcccgggcatagcgataaatcaacgatatggactgactgtccccgtcgtcaggtccatcaatcgccttcgactgcatgaagtcgtcgaatatcctgcccatcaacgcgaagaacgcggcattggcgttcacatacttcatctgggatgcgccgacaagctggtcgtatatctcatcgcataacggggcaaaggccactcccccatgcctgttgcagcggtcatagtccacttgacgctgcgcctgcagaatccgtggaaggaatgcggacatctcaaccggattgaccgtgacggacaacgcctgcggcgtggtcccccagtcctcatccttcaccatgcgaaccgcatgcacggcctccggcggaattacatgcgcctgtcccggctgcagcacggtcatggcgccattcactacgacggacatggggcagtccttcgcgtacagcacctcaagaccgctatgccagtgatatctcgctttgtcatagctttgatgggctatgaccagcgccggaaactgcgtcgttgataccagcaactcctgcttggagtcatcgacatagcgcataccgcatcctttctccgaatggatatcatctccgaatggacatcacccaaccatgttccatcatcgatgtgctcatcgtatcgacgatccttgccgcaaaacatgaaagccagtcatccggccggctttcatgttggagggaggctacgctactcggcatcgttggaaacgggaccatcgttcgacggcccggactccgtttccgcgggagatcccgcctctccatcgaccgcagaaacagaatcccccgtctcggcctcaggctgttcgaaggtctcgcccttgaaggtgaactcacccagcagaccttcgccctcggcgtcgacgataaccttctgaccgtcttcgaggtcgcccatcaggatcttctcggagatggcgtcctcgatgtcgcgctgaatcacacggcgcagcggacgagcgccgagcagcgggtcaaagcccttctgcgcaagcagatccttggcggcgtcggtaagttcgagcgacatgtggcggtcgaacagacggtcgttgagctgcttgacatccagatccacaatctgacgcacctgcggctcggtgagctgcttgaagacgatgatgtcgtccaaacggttcaggaactccggacggaactgctgcttaagctcggaactgacctgatccttcatacgctggtagctggattcgctgttggcgcccaggttgaagcccgtgttggcggccttggcgatgtcgcgcgtaccaaggttggtggtcaggatgatgatggtgttcttgaagtccaccttacggccctgaccatcggtcaagtggccatcatccagcacttgcaacaaggtgttgaagatatccgggtgagccttctcgatctcatcgaacagcaccacggagaacggcttgcggcgcaccttctcggtgagctcgccgccctcctcataaccgacgtatcccggaggcgcaccaaagagacgcgatgccgcgtacttctcggagaactcggacatatcgacgcgaatcagcgcatcctcatcgtcgaacaggaactcggccagcgtcttggccagctcggtcttgcccacgccggtggggccggcaaagatgaacgaaccggacgggcgcttcgggtccttcagacccacgcgggtacggcggatggagcgggacagggcggacaccgcctcatcctggccgataatgcgcttgtgcagctcggcttccatgttgagcagcttcttggactcagcctgggtcagcttgaacaccggaataccggtggtggagctgatgacctcggcgatcacgtcctcatccacgaccatcttgacgtcggactcgccttcgcgccaggaatcttccttcgccttgcgctcggcttccaacttctcttggttgtcgcgcagttcggcggccttctcgaagtcctggcccttgatggcctcgtccttgtcggcggcgatcttagcgatcttgccgtcaagctccttgagctcgggcggtgcggtcagacgcttgatgcgcaggcgggcaccggcctcgtcgatcaaatcgatggccttatccggcaggttgcgatcctgaatatagcggctggaaagctctgcggcagactgcaacgcaccatcggtgatggtcacgtgatggtggttctcgtagcgagaacgcaggcccttcaagatttcaatggtctcggcgatggtcggctcatgcacctggatgggctggaatcggcgttccagcgccgcgtccttctcgatatacttgcggtactcgtcggtggtggtggcgccgatggtctgcagctcgccacgggccagcatcggtttcaacatatcggaggcacccaatgcgccgtcggcagagccggcacccacgatggtgtggatctcgtcgatgaacagcacgatgtcgccacgggtcttgatttccttcaggaccttcttcagacgctcctcgaaatcaccacggtaacgggaaccggccaccatggaaccaagatccagcgagtagacctgcttgcctttcaaggtctccggcacatcgccggcctgaatcttctgggccagtccttcgaccacagcggtcttgcccacgccaggctcgccgatcagcaccgggttgttcttggtgcggcgggagagcacgaccataacgcgctcgatctcgttagtacggccgatgaccggatccaacttgccctcggaggcttcggcggtcaggttgcggccgaactggtcgagaatggcggaaccggacttgttctgcttgtccgccacgccaccggcgttggccaaatcgcccttgccgtcagtggaggtgccggagttgccgcgaatcatatcgatggttgcactgcgcagctcgcccaaatcaacgtccatcttgatgagcacctgagtgcccacgccttcgccctcgcgaatcaagccgagcagaatatgctcagtgccgatgtagctgtggcccaactgtaaagcctcacgcaacgagaactccagcacctgcttggcatgcggggtaaaggggatgtgcccgttcggggccgcgttgcccttgccgatcatctcttcgacctgcttgcgggtggcgtccaactccacgcccttcgaggcgagtgccttggcggccacgccctcaccctctcggatcaggccgagcagcaggtgttcggtgccgatgtagttgtgctggagagtcctcgcctcttcctgcgccaacacgatcacgcgccgtgcacggtcggtaaaccgttcgaacatgcttgtccttcctcaattgacattccgttttactctaccgattcacagtgacgtttattcgctggattccatgaattgcgccgtgagaggagaagaaaaacgatatgctggtgcatagattcatcctgtgatcgatggaagggaggctcaccatgagcgaaacaacaaccaaggccgacatcgttgttggtgtggatggttccgacgagtcctttgccgcattgaaatgggcgctgaaggaggcctcactgaccggacagcatgtcaatgccgtgttcggctggacccattcgtgggatatgggttccgaaccggacagcgatgaaacctgggccaaggttcgtcacgacatcgccaacgagctgaagtcgtgggtggagaaggccgcagccggcattgattttgatcccgcgaatctgaagctcacctcggtcaaggccaccggcaccgccgctttgctgcagatcggcaaggattcccagcagattgtggtcggacgccgatccttaggccgtgtggcacgctggttcatgggatcgctgtccgcatcgctggcggaaacggccgaggtcccggtcacggtggtgcgcgtctccgacagtgaggacgaaacggtgaccgatgccatcgccaacgcgctgacgccggacgaccagaccgtgcatttcgcccagcccaaaccggctatcgaagagcacagccgcccagtggtggtgggcgtggatggatcacaagcttcacgccgtgctttcgagtttgccctcgatgacgcacagctgcatggcgtgcctctgaatgtgatgttctgctggcagttgcgcgatctgggcgttatcccgggctatgaaaatgccgtggcaccggttgaagccgggcagcagcgcgccgaagcaatacttgccaagatgatgtccgaggttgacatccctgaaggaatcaaagtcagcacgaacgctttccacattcctgcatccaagggtctgattgcggcttctcggtatgcccgtcatctggtagtgggttcacgtggcctctccggtctcgatgctcatttcctaggttcggtgtctcgccagattgtgaactttgccgagtgcaacgtcaccgtcgtgcactaatcgaccaaccagcggttatccaaaaatcatctcgagaattctttgcactgacagttgctcagtgcaaagaattctcgtacaaaaggcttatttcgagaattccttgcgctggcaaagcaggtaagacccccacagctgattgcagtcgacttacttctcgtcatcctcttccgaatcggacttagtctgacggagtttttcgatcaaatccaccacggcttcaagtccgggagtcacttcttcagcggtgtccgcggtctccggttcgtcgtcaacatcatcctcgccctcaccatcatcaacggtgttttcaaggatgtcctcttcggtggcttcgtccgtgtcgggggcggggctttcggtggagatcagctgctcgtcatccgcctcaggcttgtcgctttcatccgcctcatcatcaagttctgcaggctcctgcttgcgaggccggtgggccaccacatcgatgtgcaggtcatcaaaagcgggattggcctgcacccacagacggcttggctccggaggttcaatctcggaatgctcgccgcagccatggtccagcgagaccacacggccatcatccgggctccacttgttcgcgcatacgccgaacaaacggtcgagctcgcccttaagcggcacgaagaagccacaggtggaacacagattgcctgcggccgtcttggtgctcagcgcctttggcccacgaggaccttcgtaccagcgcttggcagcctgtgcgcggcccaacgagctcaatacatggcgacgggtgagacgaaacacctccactgcgtcattgacatcctgcagggatgattcctggacctcgccatcttcgatacgctcgtcatccggattggtgccgatggaatcggtgggagacaggtcggtgggctcaagacggtctttccacggaatccacttgggcggcatcagcgcgtcttcggccggaatcagggaggactcgttcaccgtccacgaatccaattcctcatcgtgatacagcgttaccgaccactgccatccctcgtatccgcgaatgttcgcgacgaaacgaaaatcggtgacatgatcttcaagctcattggcaacgacaaagtcacccacctgatcaggctcgtcggccacttcaagcagcacggcccgtgcaatggcatgaggatccggtgtcacggcggtttcgatggtgtcagtcatgggtcgcatcagtcctgcacgtcgaattgatccgccacggcacgcagcagcgtggccagcttcttgctttcggcggcggaagggtagcgatggcgacgcaacgtgttgccggcagcgtcgagcatcttgatgaggtcctcgcagatggcggccatatcatccgccttaggacgagtggccttgaccaagctgggactggaggcgatcagcttcacatccatggcctgcgggccacgccgaccgtccaccacggaatactccaccttggcccctttgcgcagcgtattgacgccagtaggcagggcctgagccggcaggaacacgtccttgccttcctcactggtgatgaagccatatcctttggctgcgtcaaaccaacgaactcgaccggtgggcattgcgaaccttccttcaatcctcaacagtaataatgaactgaaggaatagtgtacctcacaggtcttgaccacacatcatgaggctgagtcgtctcacgatttacgctcaccgccgaaccacgaggacttctgcttggcttccttggttttgcctgcggtctgtgcggattgggcggcgggcatctgctcgatgggcagcaccacggtgaaggtcaggcctcccccatcggtggccgtggcacagataaagccatgatgggccttgaccacggactgcgcgatggccatgcccagaccggtgcctcccttttcacgggcacgcgatgggtcagccgtatagaatcgttcgaatatctttggtcgggattcgtccggcacgccaggtccatgatccacaaatcggagcacggcataccggtacccagtgctcatcgatgcgcctacttcggcggcctctacgaagcggcgcattgacgcgtcggtagccggtaaaccggaaagctgcttcgggtcaatagccgccggcatcacgccaagagcaatctccgcggatgaatcaatcggcgtgtatcggtgaatattgcccacgatattggtcactacctgacgcaaacgcgaggcatcaccaggcagggtgatggtcggccagtcaccctcagtaaggctcaacgacgccggatggttcaggtcacgggcgggctcaagcccaatcagcatacggccgatggcacggtccggatcgagggcgtgcaaatcatcaacggcatcggtaactagcgaggagagtttcaccgtgccggtcacatcgatgccacggccctcatcaagccgggccagagacagcaaatcttcgacaagcacggtcatacgctgactggaacgttcgatgtgttcgatggattcatcggcacgatccaacgccccaggcatatcgcgttgcatcttatacagttccgcataaccatggatggcggcaagcggcgtgcgcagctcgtgactggcgtcggagacgaaccgcttcatcttgtcggtggtctcttcctgctcgtggaagctgagctctattcgagtcagcatcgtgttcaacgaagcggccagagagccgacttccgtgttctcgggagcggaaggaatacgctggctcaaatcaccggcggcaatcttcgcggcggttttttccatgcgcttcagcggggtcatcgtgtgctggatgatcaatgtggccagagaaccaccaagcagcaccacggcaatgccgaccacgacgcagtaacgggaaagcgtgctgacgatgtcgatctgatcggacaaggacaggccgatatacaccacggccctctccttgccgttctccgtgaacgtcatcggcagaatgcgccacggcgaacgcgcggtactcaccgcagcatgattggcattggaggaaggattggacagaatcgtggtgacggaattcgaggagttcggagcgttcttggaaccagaattgccggcatcgttgcccgcgtcgtcttgcgtgttcggatcggtctgcggcttggtcgtattgttggaatccgaagaattgttctgtacctggacaacctgcttgaccacagcctgcgtggtgaatggctgaccgaacgtgatgcctgaggtatcgccgtcggtgggcagcaccggcacggagacgatgccgtcctgcagctgaggcatcagcggcgtgaccaccagcgggttaccctcattatccaacgtgccgtcggtgtattgaatctgcagaaagtacgagtttggcccggcattgtcgtttttggcaagcgtcacgatattctcgaacaccatctggctctgcgatttgagctggttgtcggttttgctcaacatatagttgctcaccaacgcgcggatggagaaggaaatcactgacaccccgatcagcagcacggcaatggtgcaggccacaagcttgctgctcagggagatacggtcaaaatggccgaagaacatgttcttcttgcgattgtgatgttctttcatgcgtgcgaccgcctccggggcggacgcaggcatattgggccgtggcgacttatcgggttcactcatgatggctggattagttcttcggttcgcgaatcatataaccgatgccgcgtttggtctcgatcagcggcgtcaccttgcgcttgccgccttcgccatcgtcgacctcgatgccatcgaccttcttgcgcagatacgagatatacgattcgacgattgcggcgtcaccgccccagtcgtactgccagacatggtctaggatctgcgccttggacagcacgcggccttcattgtccatcaggtagcgcagcaacttgtattccgtggggcttaaatcgatgggctgcccggctcgcgatacatcatgcgagtcctcgttaatctccaagtcggccacacgaataatcggatcatcctcaacctgttcgcgggtgcgacgcagaatcgcgcggatacgggccacaacctcctcgaggctgaatggcttggtcacgtagtcgtcgccgccaacggtaaggcccatgatcttgtcctgcgtgtcatcgcgtgcggtcagaaacagtacgggtgcgtcgatgccctcctgacggatgcgacgggttacggtgaagccgtcaatgtcaggcagcattacatccagcacgatgaggtcgggccgtaccttttcgatgacttcgatggcttcagaaccggaggccgcggtgttcacctcgaatccggcaaaatgcagcgaggcgacgagcagttcgcggatggaaggttcgtcatcaacaacaacaatcgatgcttcaataggcttactcacgtactccagattggtctacttcactggacgtttcctgaatgtcctcttggagttcgtccgcagattcctgcccgtcttcggaagcctgctcgatttcggcttcggaatccttcttgacttcacggcgacggcgaactatcaccatcaccacaacgagaacgaccatggcggccaaagccacgcccatggcgatcacgccaatcgtcaccgtggaggatgaggtggaggtcttcttggatttggcgatctggtccatcatcgccgtggctgccccggaccaattcggtgtgctttccatcagctgctgctgcgcggcttcggatagtgcatcgacggttttctgttgcttgagccattcgtcggaattggaggataccgccaccacgagattgccatcgttggcggcgacggcgagcaacacggtgtttgccttcggcttagtggactccagcaccgtgctcgcccatttctgcggtgtctgctcactgttaaagctggacagatacagcaggtgcacatgcacgccggtttccttctccgtcttggctatggcatccgagacctcggtggcatgtgagccgagcagattctccgtatcggtgatgttgtcggttatggtcacgctgctgttcgcgtcggtacccgtgctgctggaatcatccgcatacgcgtccgcagttatccacatcgatcccaatacagtcgcaacaaccacggcaatggcgcaaacaagccgctggaaggcctttgcgcttccggaaaaacggccccacaccgaagctggaaccacaatggtcgtttttccatctgtccaatgcaaatctgtcatattctccaccttagcggccggtattggcaataacggtcgtcatatcagcgctcattgttttaggaaaggagcaacaatgccccaatatcaagtggattcagaacaaatccaagcctcttcggccgcggtgaacagctcgattgcacaaatcaggcaagccgtgggcggtatgtataccaatctcaacgccctgcagaacgtatggcgaggttcggcggccacccaattcaccaccgtggcggctcaatggcgagcggcgcagcaacaaatggaggcttccttggagtccattcaacgtgcgctggcccaagcctccaacgtctatgcagacgcggaggcgcaggcatcccgtttgtttgcaggctaagcgtcatcataggcccgcgaagcgggtggggatgatcctctacgcatgcttcgtgtaaccacccccagtcagctgcgctgacagcccccgccatcgggggctagtgcgcacaagatagcaagaaggggaactccttgtaggagttccccttctttgtcagctagcaactagtcgcgtgcgaatcagtagcccatgtcggcaccggcggccggggcagcggccttcggctccggcttgttggcgacgacggcctcggtggtcaggaacagaccagcaatggaggcggcgttctgcagagcggaacgggtcaccttgaccgggtcagtcacaccggcggccagcaggtcctcgtaggtgtcggtggcggcgttgaagccttcgccatcgggcagagaacgaaccttgttgatcaccacgtcgccggacacgccagcgttctcggcaatctgcttgatcggggcttcgatggcgcggaacacgatggcggcaccggtagcctcttcgccggtcagggaggtgacggcctcagccttctcggccttggcagcagcctgaacgagggccacgccaccgccgggcagcaggccttcctcaatggcggccttggcgttacgcacggcatcttcgatgcggtgcttgcgctccttggcctcgacctcggtggcagcgccgaccttgatgacagccacgccgccggccagcttggccagacgctcctgcagcttctcacggtcgtaatcggagtcggtgttctcaatctcggcgcgaatctgagccacgcgagcgtcgatgtcttccttggagccagcgccctgaacaatggtggtctcgtccttggagacgatgaccttcttggcgtggccgagcacggaggtgtcgacggattcgagcttcaggcccagctcatcggagacgacctgagcaccggtcaggatggccatatcctgcagcatggccttgcggcggtcaccgaagcccggagccttgacagcgcaggacttgaaggtaccacgaatgttgttcagaatcagggtcggcagtgcctcgccgtcaacatcctcagcgatgatcagcagcggcttgccggtcttcatgaccagctcggccacgtgcacgatgtcctgctgggaggagaccttgccggaggtcagcagaatgtacggatcctcgagcacggcggtctggtcgtcagcgttggtgacgaagtacggggcaatgtagcccttgtcgaaacgcatgccctcggtgaagtcgaggtccagaccgaagcggttgttatcttcaacggtcacaacgccatcctggccgaccttgtccagagcctcagcgatcttctcgccgacctcggggtcagcagcggagatggtggcggtagcagcaatctggtccttggtctcaacgtccttggcagcaacgacgagctccttgacgatgacctcggtggccttctcaatgccgcgacgcagcgcgatcgggttggaaccggcgaccacgttcttcagaccctcgtgaaccagggactgggcgagcacggttgcggtggtggtaccgtcgccggcgacgtcgtcggtcttcttggcaacttccttgaccagctcggcgccgatgcgctcgtacggatcctcaaggtcgatttccttggcaatggacacgccatcgttggtgatggtcggagcgccgtaggtcttgtcgagcacgacattgcggcccttcggacccagggtgaccttgacggtgttggcgagcttgtcgaggccctccagcatgccctgacgggcttcctcatcataagaaatgatctttgccatggttgtgttgttcctccaaatggctaggtataccagttatcactcgcaagcgccgatccgtggcaaccagccgtcagctgccggttatcactctcgacctccgagtgctaactgagacattagcactcgcccttgccgagtgccaacatgactatcggcgattgcgctttgggcatgaaaaagccccgaccattacaacggtcagggcttgaagtacgtgtttccttgcgcgcttgctcattcagagcgggcttcaccggaggacagcttgacgacttccttcgcctgcgtgcccttgccggacggggcgggcgtatactccacgcgatcaccctcgtacagcatcttgaatttattggtgctgccgtcgtccttgatttccgcgtagtgcacgaaaacatcctcgccgccgtcgtccggctggatgaacccgaaccccttcttggcaaggaagaacttcacggtaccttgtgccatatctgatctttcctttgttcccttaggcgtcgcgacacaaacctatagggaacgtagaaagaaccgcatcgcgctccccctacctcgcgactagtgcacgattgtaccgtgacgagggaacaatacaaaccgaaacagtaactatttgctcaagtttctcctatgaaagtggccaccatcacattactgatggcggccacggagaaaaaggtactgtgaatgcctagttcagcagcacgacggtgatgggagcggcaagcccctgaacctgttcaacggcactgatgcccagtgtcgaagccacatcttcggcggtggccttgtccgcctcattttgataccacaccacggtggaggtcggcaccgatccggtcggatttgcggcttccacgctggtgtatccggcggtctgaagcacgtcggccttctggcccgcgtatccgctgataccggtggcattaatcacccgcacttgggtggccttgttcacagtcgctgcggcctgatcctgctgggcgctctgaccggcattatcggtagcggcggaatcggattgagcattcgaggaatcagtattctcggacttggtatcagaagagtgggtggaatcggacttggcgtcggacgagtccttcttttctgtatcggaagtctgagcggtctgcgaggaagtattcaaattcaggatgttcttgtactctccggtaacccaggcccatgcaccgaaaccgcacagcgccgctacgagaatcacgatgacgaacggtgcgatacgcgaaataaccgaacgggaaccgcggtggacgcccaccggccccttggggggattatcgaagacgtcctgctcgtacgattcgtaggtcaccttgtcgcgcgccataaagccgccctcctttatacacaaactacccacgagtgtaaccgccacacgggaaatgagccacctcgccacaaccccatgcaccgtatatgcacgtttgactacagtaatgaaccatgatcaaaccattgagagaactggtagagcccggatgggcaaacgcactggccgatgttgagccgaccatccaccgtatgggcgattttctccgggaggagaacgccgcaggcagatcctggctgccggccagccacaatattctcagggcctttaccattccgtttgattcgatcaaggtactgatcgtgggccaagacccctaccccactcccgggcatccggtgggactgagcttctgcgtggcaccggaggtacgaccgctgccgaagagcctgattaatatctataaggaactggtcgacgatctaggcgtgccgatgcctccgaacggagacctgacagcatggaccgagcgcggggtcatgttgctgaacaggtgcttgaccgtgggagtcggacgccccaactcccatcagggcaaaggctgggaagaagtcaccgaagccgctatccgagcattaaacgcacgcgtggacggcaacggcaaaccgaagcccttggtggctattctatggggacgcaacgcgcagagtctggaaccgctgctcaccaacgcctttattattaagtcacctcatccgagcccgctttccgcatcccgaggtttcttcggctccaaacctttctctcgagctaatcaggcccttatcaacatgggtgccgagcccgtggattggagtctgtaatccctccgccgtcagcgtgagtcgttagagtggtgggcatgactttgttccctacgcaaccgaacatgcctccgaagccggccgccgcgcgtccagcagccgttcctacgcccagtgcggcggcgccgctcggcgccgatgatgccaagcgcgcacgcgccttggcagacagcatccgcgcacgctttgcccaaacgctggtcggacaagacaatcttcgtgagtcgttgatcgtgacgctggtggcgggcggccatattcttatcgaatccgtgcccggcctggctaagaccaccgcggcacagacgcttgccacatgcgtatccggctcgttcaagcgcgtacagtgcacgccggatcttatgccttccgatctggtgggcactcaggtattcgattttgcctcgcagaaattcaccacacagatcggccccattcacgccaattttgtgctgttggacgaaatcaaccgctccaacgccaagacccaatccgccatgcttgaggcgatggcggaaggcacgaccactattggcggccagcgcatagccctgcccaagccgttcatggtcatcgccaccgagaaccccatcgaggaagaaggcacgttcaacctgcccgaagcccagatggaccgctttatgatgaaggccgtcatgacctatcccactgcggatcaggaagcgcgcatgctggccatgctcacacgccgcggttccgacatgatcggaccggacagcatcaccggcgagcgcatcaccgttgccgacgtggacttcctgcgtacggccgcacgccgcgtgcatgtctccgacgccatcatgcgttatgcagtcgatatcgccgccacctcacgaggggccggttccaggccggtcaagggattgtcgtccctggttcgcctgggtgcctccccgcgtgccaccatcgctttgattcgcatcggtcaggccaaggcattgctctccggccgcgactacgtggtgccggaagacatcaaggcctttgcccacgaagtgctgcgccaccgtatcatgctcaccttcgaggcgttggctgatggtgtggtcagcgatcagatcgtagacaagatcgtcgaaacggttcccgttccgtgagttccgtttccgtccgtaagaagatagaggcccttggcacccagatgagtctgcctaccgtaaggaaggcattgggtgtgttggagggcgaacacgcatccggccgccgtggcggcgggggtgacgtgatggatatgcgcgcctatgagccgggcgacgagtcccgtctgatcgactggaagaccagtgctcgtcagggtcgccctatggtggtgcagcgcgaacgtctgtctacctcccgtgtctggctgctcatggatgtgggccgtgagatgaccggcatatgcccttccggagaacaggcatacgaggtggccgccaatgcgttgcgcatgttcgccgcgctgtcgatgcgacgcgccgatgacatctctctggtgttcggcgacgagtcaagcatcacgcgcattccattcaatggcggattcgcgcagtttgaacgcacgttggataccgcattgcgccgcaactggaaccatgggcgcaatatcgatgcattgctggaatatgcacgccgcatcaaagaccacgaagccctcatcgtgttggccaccgacgagcatgcgatggccgaacgacacatcatacaattccgtcgcattgcccgaacgcatccggtggtgctaatcgatgtggccaccttaaacccgtttttgccggtatctcacggtcatcgtgctcctctggatggcacgaccggccgccgtgtgccggcattcctgcggtcccggaaaagcgccaatgaggtttccactcatcgtgaatacatggccgcagcgttggaacaggaactgacccgtgctggctctcacatgattcgtgccacttccagcgaggccatgttcgatcgctttgtcacactggtctcccgcgcactggcaaggaccacgcgcaaccagcttggttccgcccccgacctgatgttggcaggtaaccgatgagcaataccgttattctcgccgttgaccccagcgatctgcagacggttgacgctttgactttggcgggaccattaaccgccctcgtggcggtgtgcctggcattggccgtggtattggtgattacggtcatagtgatgtcccgcccaaggcgaaactccgcaaaagccacgcagccaaggggcgcacataatgtggcgggaccaaaggccacatggcatgcccgcatcaacgacgtactgagccgttatgaatccggaacgctcaatcgtgaagacgcgtttgtggagctggctcttatcgcccgtgatttcgcaggtgcttccagcggcaaacgactggaggccagcacactcgccgatttgatgcgtctgccgcgcacaccggcgaatcgtcaaggtctggatacgttgcgtcacaccatcgaagccctgtacccacctgaatttgccgatccttcgttgaacacgctggccaagagcgttaccgtgaaggaagctgccggctgggtctcgaatctggtggaaaggtggcgatcataatgttgtcatggcaatggccttgggccgctcttgccggcgttctgatcgccgcagcgatcatcctgttgttcgtcgcattctcccgtcgagtcaagcccgcggacgaggcagtattttcgctggacgatgatctcaacaccgagcatgcgtcacgtctgttccgccaatggcgggcattgggacgactggcagtcgctctcttggcgatcgcgctggtgctggccatcgcgttggtggcgcgcccctcccaagtcgattccagcgatgaacgcgcctccagccgcgacatcgtgctgtgcctggatgtctccggttccacactgccctacgaccgcgaagtcatcgacacctatctggaattggtgaagcattttgagggtgagcgcatcggcatgagcatcttcaattccacgtcacgtacggtgttcccccttactgacgactacgaactggtcaccgagcagctgaccgcagccagcaaggcgctcaagggcgtgcagacacaagacgacatcgacaagatgtcagacgcccaatatcagaaaatcgcggactggctggaaggcacgcagaaccgtaaggacgccacctcgcttatcggcgatggcgtggtctcctgcgcggccatgttgcccggcttcgcctatggtgccgccaatgaaacgaacgccaagcgccaacgcgcggcttccatcgtgctggccaccgacaatatcgtctccgggcaggaaacgtattccctcaccgaggcactggacctgaccgagcagaccatgattaccgtcgatggcctgtactccggcccgaaaaccagcgagtccgatcagaccaccgccgacatgaaatccgctatcgaagctcatggcggtgtgttcctcacccaatcggatggcgcgtccgtcaatgaattggtacgtgatattcagtcgcgcagagacaccgagtccgacaaccagtcgaaggcatccatgacggacgcccccggactgtgggtgctggcgctggccgtgattcttattatctggattgcatgcacctggaggctgagacgatgaacggattcaccttctcccccgccttgggatggcctgttggcggcgctttggcagccatcgcattggtgctggccgtggtcgaaatcgtgcttttcgttcgccgccgtcgcaaagcctccagcgacgagaccattggcgccaccattcgccgcacattgatgctcgtgattgcggcaataatgctgctgacccccagcgtgctgacaccgaccacatcccgagccatcaatgccactgatgtgattgtggccgtcgataccaccggctcgatggcggtggaagatgccacatacggctccaccgaagccattacgcgtatcgacgccgcgcgaaaggctgtgcacgacatcacgtcagcctatccgaacgccagtttcgctgccctgcgattcggcgcctcgggcaccttggacgtaccgcttacgccagatactccggccatcaacaattgggcggacactctggctgtcgaggccacctccgtctccgccggatccagccttgatgcgcctatcgaccagttgctgctcaccgccaaatcaatccgtgaagcccacccggacgatgcaatcgtgctgtatctcatcaccgatggagagcagacctccaacgtcacccgccgcaccttctcctcgctgcgccaatatctcaatgacggattcaccgtcggcgtgggctcgacggaaggcgggaagattccggtcatcgctgatggcgtgagcgccaccgacgcgaatgccaccgaccagtgggtcaccgatccggataccggtgaagccggcatctccaaaatggacgagcagaacctcaaggacatcgccgacgaaatcagcggcacctacgtgcccgtgaatgcttcatcggccttggctgatcaggtgtccgccaaggcctcaaagcaatggcgaaccactgtcaccaccaaaaaacgcactcgcgccactgcagtggtctggccgctggcaatcgcactggcagtgctgttgacgtgggaattcggcgcgtggatcgccacatcaaggagactgctatgagcacaggcaagacttctcgaaacgcccggctcccctttggcgcgcgcatcgcattggccatcgccgctgcggtgctggtactgattgccggtgtggccggggctaacctgtctgccaccgttacgttcaaccgggccaccgcatcgctgaaggccaatatcaaggccgctcaggacgagtccaccgacatggatacgctcaacgcccagcaacagcagaccgatgcccaattcgccgaggccaacagcatgcgcgcggtgctgctgccgcagatcaaagatgccatcgatgccaatgccgcagcctccgcacagctgacgaagatcaccttgcaacaggtcgaggcacagcgcaacggtacggatgcccagaacagcaccgatgcacaaagctcaagcacatcgaacggcaacgccaccaagagcgggaatctgaccgatgagcagaaaaagcaggtggaggagctgatgaaggccaaccagcagtccaccgacacgcaggcgaataccgatacttccaatcagaaagcggaacagaacgcgggcggcggcgcttccaaaccgtggtaatgggtgatgggcgcgccatccatatcactcatggcgattgtggataactgactgctttcggcaagctggaaccacataagttgtttcggctggacaggggcgtctccaatccttttagctgggtatatgaacatacccggtatcaatccaacaccagcaggtgtcgccggcaattcggcggcaccgttcaattacggagtctgcccctgccatgcggcagtgcaacgcagccgtgacctcgttgcgacgcaacgagcctccaccatcgcaacgatagatcgcactgcggccgctatcgtctgctcgaaagacatcgtgtgggccggaccggcgtctgaggaattccgctcccgcctggacgaatttcggtccaaagccgcactgttggctgacgacatggaggctacccaccgattggtttgggggtcggcatgacgaacggaaaccattactggcaggtggaagccagcatttacggtggagccggctacgcgccagccacacgcaaggaatacgcggctatcgccaaatcactggagagcgaagccgccgcactcgaagcgtgtgctgcttcgtgggatgcgggagccttgcaattacaagcacaccgttccagcgcgccgatgtgccccgcactatcaccagggaactcttcgatagcctacgctcacacctcgctgccatatgcgtctgtgggagcacggtgcactgaacatgcggcgatgtgccggcagttcagtcaagatcttgccagcaccgcacagctgctgattcgcgcgcattcgctgtattccgatgccgagctggttgctagacgggtgttcagcgaaacgttgcaggccgccacccagcggtaccctcaatacgcgctgctcggcttgggagccatagccgccggtggttttctggccggatgggccattgatggcaaaccgaaccctgtgtggatgtctacggccacctatccgttccaggagggagtattaagcggttttggtgcgatgctcggcttcgtgaggccgggacagggcatattaagcaccaatgaggtcaataaaggcgccggcaccatcgcagtattctcagggccgctcaaagatctcttccaagggaaccagctcactgtgcaggaggtgcacaccgacgccgaagtcgttcaggcaagcagctcggtggccgaatcaatggagaacctgaggcgactggcggaggaacggctcggaaaaatatcgctcgacagtggtttggaatacggcaccatcgcgattcaacgatacaaacgctccgatgggacgaatgcctggctcgttacgattcccggaaccgacgggcaagacgattccccgtttggttgggaacagaacatagagctgatgagcgcatacgccttgcgccgcaggaaggcggacagcgcgcggatggtcgccgaagcaatgcggcaggccggcatcaaatcggatgaaccggtggcccttatcggtcattcgcaaggaggaatcgccgcagcggccatcgcctcggattgggcggatcagtacaacatccaacatgtggtgaccgcaggctcgccgatagcgaaccatccgattccggaacgaacttgggtaaccagcgtggaaatcgatgacgaactggtagccgcgttggatggtgccgccaatccggccaaggcccattggctgacggtgagcggtcatgtcacgcctgcaccggctcctacgccaagcactgttgatgcagatggcttctgcacaccgggaagcgtatccatcgcaggccataccccatatgatgcggcacaggtttccggcgagcccaccgatggccgtgagatcagccactggctcaagtaccatcaggccgcttaccggaatgcctccgaccttggctcccccgccgtgcaacgccacgaagcgcatttccagcacgttatcgacggggagctcaaggagacccgctattaccaaggtcgcatgtctcgggcacaggcatcaggccatggaggacggtaagccctccatgcggagtaatcccccagtcaggcgcgacgctcgatgagcgcgcggccggaggcgagacggtcgagcacgccggttttggcgatggcgagcatcagataccaggccattacgccgctgatcagcacgccgccggtgatttccgaaatcatgtgcacgatgccgcgcgggctcacgaacgacacacccacatagcggaacagcatgagataaatgccgtattccaaggcgaccaaagcgccggatgcgatggagatcggcagattgaacatgcggtaacgcgtcgcggcaaatggaagctcggcaaacacgccctgcagcaacgccgaaatgatgacgaagcccaaatcgaactggctgccgatcaccgtctcgaccagtgtgccgataaggttcacgtacaatgccgcaccgggcttacgcagaatcagcacagccagggtgccggagaagtaccagacggcgtgcacgatgctggcaaagccgggaagaatcgcaccgaacaccgaggagatcggcatgtaggcaaagttgaagccccagaagattacgccgcaggccgcgcccagcgtagcgccgaccgcaatgtccaacggctgccatttcagcgacgatacggcgactggacgtttgggaagagtatggatattgacggtttcgggcatggtaatctccttgccttaagggccgcacacagtaatcggatcgggggcgttccttgacctgcgcggctcgggcgggaacgccacaccacagtatagccgctcggttcacggctggaagtacccttggaggttatgaagcttaccgatatttcccccgcaatcgcattgaccccgcttgacggccgctaccataaggccaccgctccgctcgttgaatacatgagcgaacccgccctcaaccgtgaacgtatgcgtgtcgaagtcgaatggatgattcttctggccaacggcttcgagggcaacggcaaccagccgatcgttgacggcgtcaaaccgttcaccgaggccgagcaggccttcctgcgtgccattcccgaggatttcggcgctgagggcatcaagcagcacgccgctcacgaggccatcacccaccacgatgtgaaggctgtggagtactacatcgacgaccagatcgacaaggctccgaccgagctgaccaacatcaacgatgagctgaagaccctcgtgcacttcgcctgcacgtccgaagacatcaacaacctctccatcgcccgttgcgtcaagaacgccatggagaacgtgtggacccctgagttcgagcgcatcatcgatcaccttgccagcaaggccgaagagttcaaggacatgccgctgctctccctcacccacggccaaccggcaacgccgactacgctcggcaaggagctcgccgtctacgtctaccgtctgaaccgccagctcaagcacctcgaaaatcaggaatacctgggcaagatcaatggtgcgaccggcacgttcggtgcccatctggccgcctgcccggatgtcgactgggtcgccgtctcccgcgagttcgtcaccaaccgcatgggactgacctggaaccctctgaccacgcagatcgaaagccacgactggcaggccgagctctactccaccgtctcccacgccaaccgcatcatgcacaacctgtgcgtggacgtgtggatgtacatctcccgtggcgtgttcgcccaggtgccggtcaagggcgccaccggctcctccaccatgccgcacaaggtcaacccgatccgtttcgagaacgccgaagccaacttcgagatctcctgctcactgctcgacaccctctcagccacgctggtggaatcccgttggcagcgcgatctgaccgattcgaccacccagcgcaacatcggttccgcactcggctactcgctgcttgccctgaccaaccttatgggcggcctcgaatccatccacccgaacgctcacgtcatcgagcgtgagcttgacaacaactgggaagtgcttggcgagccgattcagaccgctatgcgcgcttgcgagctcaagggtctgccgggcatggacaagccgtacgagaaagtcaaggagctcatgcgcggccacaccatcaacaaggagcaggtcgaacagttcatcgaccagcagtccttcgacccggaaaccgccgctcgtttgaaggctctgacccccgccacctacaccggcgtggccagccagcttgtcgccttcgatcgctgagcccggctcaccccgcacactccaacaccatcgaactgaaccgaacaaggacaggcgtcaggtagctatttcatgaccactgaacaggatcagtccactacggaagatcgcccgagcgaggcatcttccttcacctccgaccggccgattgcctctggcgacggccggtcggccgattatcccgtcgaacagtcggactcttccatgaatagctccggcaaaggctctggaccctatatcgacgacatcgccccacgccgcacccgcgattttggcgatctgacccgcgccgggctgtcgttgctcatggcagcggtggtcatggtgtttgccgtataccttggcggtatgacccgcggcgtcgaatccgacgcccataccgcagccacagccattaattggttggctgattttccctcaaccgtacttacccagctagccaccatcgtcatcgtggtaatcgtgctggcgcaattgctgatagcccgggaatggctgcaggccgcggtctctgccttggctatgtttgccggctatggtgtggtggccgccatatccatactgattagtggattgcatgattacacgctggcactggctttggtctctgccgccacttctttcgggtcggctctgctgcccagcatctatggtggcatggcggctttcctgactgcggcaggccctcgtcgaacccgctccacagtcaagtggggatggaatattctgtacgccaccgccgcagtgatggtcgtcctctcctggcactccgtaaccggcatgctggtttccatggcagccggccgtgcgatgggcatgcttatccgttttcttatcggcacgcaaaacaaaggcgtgtggggcgatgagcttgttgccacattgcacagcatcggtctggatacggcatcgctgattcgccatcaggagttggacgacggcaagggcaaatccttggccgccacattggacgacgatctgaccgagggatcgcgcatttatgatctcgagaccacggataatcgccgtttcatcgtctccgtcatagacgcgcagacgcataccgccggctatctcaaacagctgtgggactgggcccgattcaccagcgtgtccattcgccgagaccgttccgtgcgagacgccgtccagcatcatttcgccatgctgctgggattacacagcatcaatctaccggctccgatcgtatatggcatcgccgataccgatgagtccgccattctggtgctggacgcgcataccatcgaaatgcccgccaatctcaataccttgaccaaggccgatgccgtggcgtatatgcgctacttgtccgtggcgaatcgcagaggttacacgcaccgccgcatcacccccgatacgcttgcccgactcgaggacggcaccgcagtaattgccggttggctcaacggcgacaacgcctccgcctcggccaacaccgcactggataaggtgcagctgctcacactgttcgctgcgctgatcggcgtggagccgacgattgaagcggcccgggagacttggggcgacgccacgctgacctccctcgtgccattcatccaaaaagtcgcggtgccctcccccacacgcgcactggacacttgggataagcagctgctcacagcattgagaagccgtatcaacgccatggccgatgaagacgttgtggaagccaccgaaccggcgacgcttgcccgattctcctggcgctcgatgctgaccatgctgctggtcatcgttgccgtagtggtggtgttcacacagctcaatcccgaagaaattatcactgcgctgtccaacgccagcccgttgatggcggtggtcacgctgctcttcggtgtttgcggatggattggatcgtcgatttcgctggggtccttgatagatcgtgataagcgcgataatacgggcgtgctcatgagtcaggtggcgggtggattcgccactgtctcaatgcctgcaggcgtggggccctcgttcgtcaatctgcaattcctgcgcaaatcgggatatcggaacacccaggccactgcgattatgagtgcggcgctggtggtgtattacgccgtctacttctccatgctggtgctgattggcctgttcaccgggcgtagcacgttctccggttcgattccgaccaataccctggtcattgtgctgggagcagtggtcgtggtgatttccgtggcgatgatgattcctccgctacgacatctggtgacacgccgtctggtacctctggccaagacctatatcaaccagttgctggacgtactttcccagcctcgtcaactgaccatcagctgcctgggcgcattgttccaaaacgtgacaaccggcttggcattttggtcggcgttgcaggcttttggccatacttccaaccccatagagacgactttcgtgttcatgctggcatacgcactcggttccgccgttcccacccccggcggcctgggcggtgtggaagccgcattgacatttgcattcgtggcggtcggcgtgccacagggcgtggcattgtctgccacactgctgcatcgtgtggtgttctactggctgagaatccccctcggagcagctgccatgaagtggctggacaagcacaatctcgtctgatttttgcccttgccctcccctcgaaaaaaacacataaatcctatataaaatgcgggttttcgcagtcacatgcgctattatcattgattgaacgggcaaagcaacaaatgccgccccctgaccaagaaggatgctttatggcatacaacaagtctgatctcgtttccaagatcgcccagaagtccaacctgaccaaggctcaggccgaagctgccgtcaacgctttccaggacgtgttcgtcgaggcaatgaagtccggcgaaggcctgaagctcaccggtctcttctccgctgagcgcgtcaagcgcgctgctcgcaccggccgcaacccgcgcaccggtgagaccatcaacattccggcttcctacggcgttcgcatctccgccggctccctgctgaagaaggccgtcaccgagtgacctgccgctagcagcgagagtcccgtagagtaacaacgagatagcaagaaccccgaccattgtggtcggggttctttgtgtattgcgacacagattaggggggggctatttaagcctgcacaggctcatcagaactattcggaagcaccctcatcaactgtgtgaattcttcggtcggctcggattcgaatgggtcgagaagcacggcttcgcggcgttcgggagccgccacggttaagtgggtccagtctgcggagaactgggctccggcggcaagcgctgccctgacgaattgaccacgcagggctgcacgagtgtcggtaggcggattgtgcacggcgattgccacgtcattgctcgtcaagagttcgcgcagctggttgcgggaggtcagtgaaccatacaggcggccattggcgatgtcgtggtaatcgagctcaagctgttccaactgggcgaaggtgacatccggtcgacggttcctgagcgcgtcgaatagacgcttcttggcagcccagtccacacggtcagcgagcgcatcgtattcaccgtggtccagtgcgtccagagcacggtgccactcccccatgacggtcttgattcccgtcaccggcagcgagccgaccaaggcatcatcatgattcgtgataaaggcttcgaccgctgcataataccggcgctgcaaatccaatgcagtcacggattcgcccgattcaagcgccagctcggcatgtgagttgtccgggaaccggctgacggcacggttggcagccgcagggtcagcaaaggcatagtcctcgaatccagaaggaacttcattgcggaaggcatcttcaatcacgcacagcacgaggtgcgtcacggcaagcttcatccatgtggcccattgcgaacggttcgagtcgccgatgatcacatgcagccgacggaaggagtcggggtcggcgtgcggttcgtcgcgcgtgttgaccatcggacgggaacgtgtggtggccgaggagacggcttcgtccaggaagtccgcacgttgggtgatttggaagccgtccggagtcatgcggccggcgccggtgaacagttgacgggtgatgaggaacggcagcagctggtgctcgatggtctccaacggcacgaaacggcggaccagatagttctcgtggcaaccgaaagcatgaccggcggagtcgacgttgttcttgaacacgtgaatcatggcgcgctcgccgtgagtctcacgcagtttgcgctgcgccttcaaagccagattgcgcatgacctgttcgccggcgagatcctgagccagagcctcgcgcggatctcgtgcctcggcggtggcgtattcggggtgggatccgacgtccagatacaggcgtgagccattatccagataggtgttggtggaacgtgagcgggacacgaccggctggaacatggtcatggccacctggccggcgtccaccggcttgctggcaccggtcacggacactccgtattcggtttccacgccgaaaatacggcagaacccgtccatctcagcggatggcacgggttccgaagcatgcagggagcgggtgccgctgtcacgcagctgaggcatcactcgccacctttttgcacgaagctgttgacgtattcctcggcattggtttccaaagtggattcgatgtcgttgagaatgtcgtcgagtacgtcggactggtcctcagcttggatgtctggctgcacggaagcgagcgtctcatcttcctgagccgccgactgctgggcttgcgactgttcaaatttttgtggcatgttgccttcttttgtgaattgattcgattcgagggctcccctcagtctcgcttcgcgagccagctcccctcagagaggggagccaaggatcccaagacagatcaagtatttatcgctggttgatggaatcgggccaggggtatcgctgcaggtattgccgcagttcgcgaatgatcaggccgttggaggccactacgtcattgtcgtgacgccagtggatgcgttcgccgtcccatcggctcagcgtaccctgggcctcccacaccaccacggttcctgcggcgatggccgcgatgtcccacacgtgcagcatgggttcaaagtaggcatcatacgtaccgtccgcaaccttgcacaagtcaagcgaggcgggaccgacacgcttgatatcggccggctgtcccgcaagagcggatgcgacatcaagggcacgctgagattcgctggggatgaaggacatgccatagctcagcacggaaccgtccagcgaggaggtcatcgagggaacgactttgtcgcgcttttcaccgacagcagtcttatgaatacgcacggctcccgctcccctggcggccaaataggtcaagcccaaggccggcgcatgcaccacaccgataatgggcttgggctcattatccggtccgaactcaaagagagccgctgtcagggtccattcgctcatgcggcgcacatagttgatgacaccgtcgattttgccgatgtaccaatagcgctgaccagggcggctttcggcggggcgtgtggtccagaacccgtcgaaatgggcgatgtcggcaagtctggaactcatgaaacgcagaatcttgctgtcggtctccagcctatagcgagggccgtgttcgccatcgtccgtactgggcagggcgagattgcgtgggttgagctgatcgtgaagggcgtgctggccggcttcctcaagcaatccggcgaccttgagcgccaggttgcgcaggtcctgtggggtctcttcgcgtgtttcttccatagtcatcaagtttaccgttcaccattgatggccaatgccttcagtagatcgatggcgtgttcggctgcgttgagctttgcttcgcaacgtgctttgccataggcgagcggatcggagatgtccaatgagaacaagtgatgatcgggcgcggccatatgccccgcattgccgtagaactcggtcgcctctccggcatcgaccgcgttagggtctcgtgcggtcaggcgagaccaactgacggctgccacttcgacaccaaagcgctccaccaatttggccctcagccatgcgcgggtattttcaggaggctctgtggtggcacatgcgaggtcggctgcggcgtttacccgctcggtacgcggttcaagcttggcaaacacgctatcccgagaatcgagggcggcccacttcaaatcgatgaccttcagacgagaatcgtcccaaccgttggcggcatcgggggttgccgctccggtgatctttcggcgcaacttttccaacagttgccatttgagcagccattcaacacgactggcctcgccggtcatggtaagacgctgatcggcgtcggcatgacggatggcgacgcaatcggcaagcgcctgcccccacatcgccatgacggaagtggtggacttgtccggccatgcgggttccccagaggtgtccgtgccgtcaatcagcgcagcgacctggtaaacggcttgcctcagcttgagctgaatcagccaggcggtggtctcaccgccattggccagcggcagtgcagcgtctaacgtgaggtcatgtgagacgatgtgcatggcttccaccggatcggccagctcaagttcgtcaagaaaagcgttgagatcaaagccggcctcatcagcatgctcgagcagccacagcagcatgctcgtagtgccaagcttcaacacttgcggcacatccatgcggttggcatcgccaacgatgacatgcaggcggcgatactcgtcggtggcgtgcgattcgtcgcgcgtgttgataatcggccgttcaaaagtggtctgcaatccgaccttggcgtggatatagtcggcacgctggctcagttgataaccgggcatctcactgcgctcgccgattcccacgcgaccggagccggcgtatatctggcgtgtgacgaagtgcagagtcatcaggcgagtgacctgatcgaagggaaacgcacgggccatcatatagttctcgtgcgtgccccagcaggagcctttgccgtccacgttgttgcgatgtagttcgataggcgtgccggtctggctgctggcccgctcggtggcggcttgcatgatgaggtcgccagcatgatcgtagaggacggcctcgaatgggtcagtcgtttccggtgcggaatattcggggtgcgcatggtcgacgtagacacggccgccgttgggggcgatcacgttggtgatattcagttgcggtgcatcggtgagcatgtcagggcgtgccgcagcgcgttcaaggcgggtgccacgcgcatcgttgaccggatcttcctgccggtaatcccatcggatgttcttgctatggctgtctgccgcaccgttgaccacatcgaaagacagttgcaccgggttataacgaccggctccgctcagcgacaccgcatattcggtttcggtgcccatcacacgcttcacactcatggattccataatagacgtggctcccggccttgcctgagcaaagacgggagccacgaggttaggaatgggtcatatacgactgattatgcgcgtgccttttcgcacgctgcgtcacttggcggtggtgtacagtccgttgtcgaactggaagccggtgcattccttgtattcggagaccatctggttccaagaggattcgatgttgtcggtcaggccgaacagaccggagcggccgatgacgtaaacatccgggttcgcatcggaaatcatcttccagtgcgccttgttggtggagccgtccatctcgatctcgtagttgtagcccttctcctcgcgcagagcacgcagttcgacgatcttgtcaagcgtcgactcgaggaagcgctggccagcgaaaccggggtcgatggtcatgatcgtgatcttgtcgagcagatcgatgtacggcttgatgacatcgattgaggtctccgggttgagcacagcgccagccttaagaccggcagcgtggatcttgtcgatcatagagaaagccacaccgttggccacctcggaggggaagcagatgtagtcgcacttgacctcgatgagacgatcgacccagaagggggcgtccatcaccatcatgtgggcgctcatcggcacatcggagatcttgcgtacctgttccacgaaccagggagagagggtgatgttcggcacgaagtgaccgtccatcacatcgatgtggaaggagttgaccttgtcattgaggaaagtaatctgctccttgaactgatcgagatccatggtcatcagggacggtgagagctgaatcttgcgagtcattactgcgcttctttcttgagtaatacgggatatttccaggtttttgggcataagaaaccgcgcgccggtgccacagaccttgtgattccggttggccggcgcgcggccttactctgttgtgatgattgcggtcagttactgaccgatgtaacggtgtccgctatctcgcggtgccaatcacatgactttgatgtcgtcgaggtcgagctcctcttcctcggcggaggaggactgcacggcatcgagctgatcggcggggatgtccttcttaatcagtgcgtagaccacgccggtgacgaccacgttggcggcgatggccagcaggccgacccaccagttggcgcccatggtcggcagcatgaggaagccaccgaacggaaccgttgcgccttcgccgttggcaagggacatcaggattgcgccttcaacgcagccgccgaggccagcagccacgatgccacgcaccaggtcgttcatcacaatcgggatggtgccttcgacgatgttgaccacgcccatcggcacggaggacttcagggtctcgacctcttcgcgggtgtagatgttcttgcgcagcagcttggcgacaaggaatgcgaagccgaagccgatcggggtggcggtgttggtcagctgcagagcggtgacggcgccgttgaggccttcagcctgcagggtcagggcgaatgcgaatgcggtcttgttgatcgggccgccgaaatcgacgatggacagggtaccgatcacagcaccgaagatgaggttggaggcaccggacatggactgcagcaggttggtcagccagctggtgaaccaggagaccggggtgccgatgatgtagaccatgatcagaccggagctcagtgatgctaggaacggcacgatcagagtaggcatcaggcccttggcccaactcggaaccttcacgaacttgatgacggccacggcgatccagccggcgacataaccaccgatgatgccgccgatgaaaccggcggagatggagttggccgcgagacccaccacaaagcccggtgcgatacccggcttaccggcgatggagaaggcgatgccggtggcgatgatgaccggcagcatgcccagggccttgccaccgagggtggcgagcgcttccaggaagttgaacttgcccatcacaagcgagtcctggctggtaccgccgaaggccataccgatggcaatgacgaaaccggcaccgcacacgattggaatcatgtacgagattgcggtaagcaggtgccccttaaaattggcagccttccagaaattcttcattgaaattcctccttgttttcttatctctattgctataagcgcggaaagcgattacttttcggcgatttcgtgaagcttggcgatgagcttgttcggagccttgatcgcggtctcggtggagaccttgacgaccttcttgccggcaaagcgctcttcgttggcgatcttgatatcgatggcgagaatcacaatgtccgcgtcggcgatgtcctgggcggtcagctcgttctcgacgccgatggtgccctgggtctcgatcttgacctcatcgcccgcggccttggcggcatcttcgagcttctgctgggccatgtaggtgtgcgcaatgccaacggtgcaggcgctcactccgacgatcttcatgatgtactcctttattgtgtttattggtttctattggttcgggaaacggttcagtcttggaacgcggcgatgacctcgtcggcatccttggctttaagcagcgcgtcaacgacttgctgctgggccatcttgcgggcgaacatcgagagcagcttcagatgatcgttcgcgccatcgccggaggcaccgacggtgaacatgaccaccagcttggcgccggtgtcatccaaggattcccactcgatctcatgatcgagaatcgcgatggcgacgccgttgcgggtcacagtctcgctacggccgtgagggatggcaatgtgattgccgatgccggtggcgccttcctcctcgcgcttgtgcagtgcatcgaggaagtcatcgacggaggaaacgtatccttgttcaaacaagcgctcggcgagcgtgcggaacacatcttccttggtctcgaccttgacgtcagtgagaatcgtgttgcgatcgagaacgtcgttgagggtaagggttgcggtgtctgccactgtggttcctttctcctagttgttgaaaaaatcgtttggttcctattggaaaatctgggttactgactcttggctgccggtactgaacacgttcagcaccgcatcgtcggccagtgaggtgaagaagcgtttcacggcttccccatcgtccgcgctcggctgttcgggcaccacagtgaacacgaaccgatccactgccgcgccttcactccaatcgagaagcggttcggcgagtttgacgtagacgaacgcgccttcagtaaccgccgagcatgtggcgtgcggaatcgctgtgttggtggcaataagcgtattgcccgaatcttcgcgggccacaagggcttcgaccagcgcgtcttgctcgccgaatggcaccacgccttgctgggcaagagactcagccacgctggagataagcgtgtgcttgtcgttggcggccaatgccggctcccataccatgagtcgtttcatcgtcccatcgcctccctgcggattcggttggcttcctgttcgagacggtcctgatcctcggtggtgagcatcgcggacaccaccaacgtgggcgctgcgacgtcatccggcaggcggacggtggaaacaaccagatcgatatccgagtatttggcgagcgtttgcgccagattgcgcgacgacaccgtttccacaatgttgaacccggaaaagcgcttggcgatcttggcctgcaatagctgcgcggtgcccaagcccgttgtgcataccagtagcaggttgagcggcatcggagcacgctccacggcctgcgcgaaatgcacggtgatgaaaccaagctcctcatcgtcgatgcgggcaagcccatggcggcgctccagctcgtggcaggcatcgctcaccttgctgaacaggtatgggtattcaagcttgatttgctcgagcagattgttggccacacgaatgttgttgcgcaagcggttcatcagcggcttcatatgcagcgacaggtgagcgaacagcgcctgcttgccgatggtgcggaaggccgggtcttcggcgacatgatcgatgagttcataagtcaactcgcgcacgtcatcggggatctcgtgcgggtcgagctgagcgaagtcgatgcgcgaggaagtgaggtactggtacaggtagtagacctcgatacgcggcagtgcggtgccgaggtaggcgtcgaagttgccgatgaccttctcgcagacctgcgtgatctcctgatggtgctccatcagcgcttcgtcagcgttgccctgctctccttcgtcgatcaatgccccgacgccgcggaagcgttcgatgagaatgtacaggtgggtgaacaggttcacgctgtacgggtaaggaacctgtgcgtgggtgaggtcctcgatgaggtcaagctggtgagagacgaatgccacgtcacgctgctgcaccgtatggtcagcgtgcatgaactgaccattggcgatgtcatcatcggtgaccaacaggctggccatcgcacgacggatgtcggtttcggtgccggacacccaaatgacatcggcgctgcgggcaagatccaaatcgaacttggcaagcatgctacgcaaggtgcgcacatccaccgcgatagcggattcgctgatgtagaacttgccccacagatcattgatgcggtactgctgcggagcggtgatgagcagacgcttgatgatctcgtcgcggcgttccaccgagctcagcacaccgggcttgccggcttccgcgttgaggtctcgctgggcgaagtaattggaggagttgaggcgatagccgcgaccgcgctgcgattcgatgatcatgccattcgtggactgttcgttgacatgcttgacgatgcgcgacacggttttggtcgacacgccaagaaccgcggacagctccgttccgggaacgaaatcacggcggttcaacaggtagttgagcagtgatttattgtagccagtcgccattgccttgcctccttgacatattccaatgtaaggggaacacggaggcggactgccgttctacggacaaactgttgtccgttgtctacggacactgcctcctgtccgtagacaacggacatcagaccatcagccgctccgagtagcgctgccgcacgaacctaatatgagagttgagggcggtttttccgcctttgcacctgatgcctgttcaataggtctcatgaatctcatgaaaggaaacgcgatgaagggttggcctggagaatcgaagctgaatataccgttcaatgaagtgatcgcctatgacgctgctgcggctcatgccaggcagccgatcgccaacgtcatctttgatttcggcaatgtactcgtcgattgggatccgcaggcactgttcatgccgcgctacagcgagaagcgtatcgaggattttctcgacaatgacatatccggcttttacgacgcctgcgacaggatggatgcgggagccagcccggccgagggtattgcgtggatgcgtgagactcatggcgaacgttgggctgagatgcttacctactatttcgataatttcttggactcacttaccggcaccattcccggcatgcgcgtactggtgcatgacatcaaggccgccggccttggtgtatggggattgtcgaattggcaacgggagaccattggcgaggccgagaacgcctatgagattctgcgtatgctgaacggacgcgtcatttccagtgaggtccatatgcgcaagcccgatacggccatctatatgaaagcgttggagtcctttggcattgatgccgagacaaccgtgtttgttgacgacagggcgtccaatgtgatcggcgcgaaccgtgcggggattcgctgcatccgtttccgcgacgagcgcggactgcgagagacgcttatcgatgccggagtgccgattccggcggtcgccgaataggtatgtgatcgttccattgtgcggctgacttatggctataactcagccgcacagctgattcaacgccctactgcacggattgcagtgactcgtccagcgtcgaaaccattgacgcgcgcccattgcaccggatcggcatccagcagcgaatcgcgagtctcagcgaactcatcttcgaccgcacggccaagcaacgtggcatcaagagccacatccttgcctgatgcaatcgatgctttaaccgcgtgggtcttcgcacggtcaacgatattcttgaggctcgcgccggaaaccacgtcggccaggaacagcgcattccacgtgccgcgctcgtcacgcacgtcggcgagatgccggcgctcggaacgtgtatagatatctcgcacaagtacgcgggagagcgcatcggcatccagaccctgttcaagcggcaggtcgtcagtcaggtaatgacgcacgatggaggcggcggcctcgccggaaggccggtctatacgaatcttcacgtcaagacggcccgggcgcagcacggcgggatcgatcatgtccacacggttggaggcgccaatcaccatcacgttatcgagcgattccacgccgtcgagttcggaaaggaactgtggcacgatggtggtttccacatcggaggaaacgccagagccacgggttctcagcagcgagtccatctcatcaatgaacacgaccaccagcttgccttcggcggcgcgttcgcgggcacgctggaagatcagacgaatcagacgctcggattcaccgacgtacttgttgagcagttcaggccctttgacggacaggaacacacccttgacctgctgctctctgccgttgatagagccatcgccatccatgtcacagccgccttcgcacaaggcattggccacggctttggcaatcatcgttttgccattgccgggaggcccgtagagcaatacgcccttcggcggcttcaaatcgtagcgctcaaatagcgcgcgatgctggaacggcagctgcacggcatccctgatacggccgatctcgctgtccaaaccgccgatgtcggcaaaggtgacgtctggcgtctcttccaacaccagatcccggtcactctcattgggcagcagttcgatggcgagccgcacggacggatcgacgataatgcgatcgccttggctgatggcggtcaaactgagcgcactggaacggcgcaccagcacgggattgccggaagcatcggcaacaatcagacgcccatcatcgagtatttgcttgactactcgaatctggcccacggtatcggcatcgcgctgttcaaccagcacaagcttctcgttgagcataacggtggagccggcagcaagacgagacgcattgacgttcgctgccacgggcacaatcatgcgtcgagtgccggaaatcacctcggcactggcatgctgcacgccgtcctcatcggtgtgggtcgaatcgattttgaccatcgtggcgaaggtgagcggcggctgtgcaagttgcgccagctgcgatttggctttggtgagctctttgccggcacggttcagagcttcggcgagcgcatggttcttggccataagccggtcgttcagctcggcaagattttcggcttctcccatatatgccttcactcccctatcggaaccatccgaacccttatgcgggcttggcgttattcgccatgctgtgctttcctgttacgcaccacagtacgcacttttttcaccgcgaaccatacgatgaccacaaccacggccacgatgaccacgtcttcgaacacaccgagcgcaccttgaatcgagcaccattggtctccgagcagataacctgcggacaccaagatggtgttccatacggccgatccgagcagggtccagccggtgaactgcaggaaattcatacggttgaagccggcgggaatggaaatcagcgagcgcaccacgggaatcacgcggccgatgagcaccgaccatgtgccgtacttggtgaaccaatcgttggccttgctcacatccttgcggctgacgcctggaatcttgtccgccgcacggttgatgcgatgcaagcccacccaacgggaaatgccatacagcgtccatgcacccagcaaagagccaatggtggcccagatgatcgcgccgggcagactcagcgtgccgcgggccgcggtgaagcctgcgagcggcagaatcacttcggaagggatgggcgggaacaccgattcgagggcgatggccagagccacgccgacgccgccgatggtttccatcagggtgatgagccattcggtgatggtgccgatcaggccgccttcggacgtggtacagatgggtgtggggttagccgcgagtgcagtggcaagctccatagaaaaactcatagagggcattgtctcaaggtttttcgagaatcgaaagcatgacgcaagaagatgtgcattttattgacaagtccgccgaaagcgaagttggggctttgggcggttccgccgattccgtaccgacgctggctgagcccggtctgctggtgatggatgtggactccacgctcatcgacgaagaggttattgatgagttgggcgaggccgccggatccggtgaggaaatcgcgaaggtgacagaacgcgcgatgcgtggcgagttggagttctgcgacgcgttgcgggcccgtgtggcattgcttgagggtttgccggtctccgtgttcgacaccgtgcatgacaagctgcatttcaccaaaggcgcgctggagctgattgacacgctgcatgcgcatggctggaaggtcggcgtggtgtccggcggcttccatgaggtggtcgacaagctggccgccgaggggcatatcgattattggattgcgaaccgtcttgaagttgccgatgggcgcttgaccggcaaggtgttgggcgagattgtctgcaagaccgtgaaactgcatgcgctgcgggagtgggccaagcagctggatattccgatgagccagaccgtggccgtgggtgatggcgcgaatgatattccgatgattcaggccgccagtctgggtattgctttctgcgccaagccgaagacccaggtcgccgccgatgaggctatcaacgaccgcgacctgatgcacgtactcgactatctgcgccggtagaccggtagataattaccggtattggctgaggcccttatagttgaggcatgactacatcggacgcacagcagctcacgcttgacgggttggccccgcgcaagcggcgcaaacgtgcgcccgcggagcacacgcccgccgagcatgatcccattgcacaagtggtgcttgatgtgcaggcgctgcatcttggtcagacattcgactacttcatcgacgagaaagacagtgatgccgcgcaacccggcgttctggtgcgcgtgcggttcggcggtcaacgggtcggcggcgtgatttggtcgcggacttccaccagcgatacgccgcgttcttcgattcgctatatcgagcgggtgataagccccgatgtgctggttccggcttcgatgcgcgaggatatcgggctcatcgccaatgcctatggtggtacgcgggccaatatcctgcgctttgccgtgccgccgcgcgtggccaaggtggaggccgagcagcggttgactgcttcgttccggcgaccggtcggtggctcgttgccggataacgtacaaggagggtttgccggccgcggcaccctgccggatggcacccgcccatccggttcctcgtttgaggtggccgattcggtatcagagggcgccgcacaagcctatcggcgcattgccgccaattatggtgaagccaatgtgctgaatgatgccctgcacgggcaacggttccaatcctttgttttcgacttgctatccggagcccaggaatggcaacggaatatggcatggatggttgccactgcgctcagcgccggcaaaccgtccgtggtggaacttcccaccatgagggaagtcgaggatttgcttccaatgttgcgcaactatgggctcaaaccgttctcccccacaccttccggcagctggataggcgatgtcgcagtgttgaatgcccagatgcctgcggcggaccgataccgtgcgtatttggccgtggcattaggacaggtaaaggtgattatcggcacccgcgcagtgatgtatgcgccggttgagggtcccgctttgttcgccatattggaagatgccgcctatcagaacatggatggcatgatgccgtatccgcaggcacgcggtgtgatgcggttgcgtgccaaatcgcatggcggcgtattcgtggcgatggccaatgcgcgcacggtgcagagtcagtgggagaacactggtccaggcacggtggagacgccggtgagtggctattccacggcgattcaccctcttgcctcaccgttgaaggatgcaacgccgtgggttcgttggctgaatcgcgacgagctggctcgtttggcggatgcgaccatcggcgctcgtgtgcctcatacggctgtgcgcgtgctcagcaaagcgttggaaagcggccccgtgctgctctcgattcctcaggacagtaccagtgaagcattgagctgtgcgaaatgccaccgtcaggcacgatgcgcgaaatgttccggtccgctgcaattgccggcagatagaagcgaatccgcgcctcggtgtcaatggtgcggcgctgcggccattcattggacatgccccggctgtgggcatgaacgcatgcgtgtggtacgtgtgggggcggccggcacggctgctgaattggctggactgttccgcggcgtgccgatggtgttgtccagcaaggctcagggattggtccgcgatgtgccatgcaagcctatgattgtgattgccacgccgggtttcgagccgcgtgtacgcccggtgagcaatgagcggggggcggctggccacgaataccgcgccgtggcgattcttgatgcttggaccagtctgtatgcactgggtgtagatgcacgcttggatacgttgacggcttggatgcgggcggtttcgctgtgcgcgcctcgctctcgaggcgggcaggcgctgatattgggagagaccgatccggccatcgctcaatcgttgatgatgtgggattcgcgaattttggcatccaaggatctggacgagcgcatggaaaccggtatgccgccgactgtggccgcggcctgtgtgtggggacgacgcgatgcggtgatgacgctgatgcagcgcattggcgcgctcggaggagactgggcggtatgcggcgagttgccgggcatgctgggaccggtgccgattgctcagcccgataccgtcgatgcgcgggagctcgaagccacggccgaccgggtgaaagccgtggtacgtgtgccgcaaagccagcgagctgagctggccattcgtcttcaccgggaaaccgcccgtcatgtggcctctcgggaacccggcgaactccgattccgtattgatcctaaagacctgatctaggtttcccgtgtcaacgcctctctggctcccctctggaggctgagcctaaagcaaacagcccaacgggctgtttgtaggcggaggcgagacgatagtcgagccagaaggtctcgggcaagacccgtccataattgcaggacgagctgtctgtgacggcagactgaggggaggcccaaaaaccaaatcgtctccaacacgtgaaacgatgattacagaacaacaacctcaaaacggaggaggaaccatgaagggttggcccggagagccggatatggattacgatgtgctggttgcagacggcgaagctgccacgaacgccggcaaaccaatcaccgacgtgattttcgacttcggcaatgtactgatctactgggatccggccgcagtgcttatcccccgttacagccagaagaccatcgacgcatttctcgataacgacatctccggtttctacgatgtcaacgacctcatggacggcggcaccagcaccgaggaggccatcgctattatgcgcgagcgcaaaggcgacaagtgggccgacatcctcgactattacatcaagaacttccgcgattccctgaccggcattgtgcccggcgcgcgcgtgctggtcgacgacctcaaggctgccggcatcggagtatggggactgagcaactgggaggccagcttgttccatgtggccgaggaacagtgtgacatcctgcagaagctggatggcaagctggtctccggttttgttaagctgcgcaaaccccataaggaaatctatgatgcggcgctgaaggagttcggcatcaaggcagatggcgctctgttcattgacgacaaggccatgaacatcgttggctcgaacgctgcaggcattcgtggcgttcgcttccagaatcccgtcaagctgcgcgaattgctcattgccaacggcgtgaacattcccgacgtgcagtaggactctgttccgcaccccgcttttgacactcgtcagatgcagagcctgcgcatgtgcggccaccgcattctcgcttatccgttgacaatgactttatccgtgacatgagcacgggtttgttcccgctaaggaagaaatatgctcaaactagtgtttgccggcacgcccgatgtagcagtgccctcacttcaggcgttcgccgccgactctcgttttgaggtcgtcggcgtcatcacccgtccggacgcgcctactggccgtggtcgaaagctcacgccgagcccggtcaaagccgcagccgtggagcttggtctgaccgtgattgacgccaagcctcgctcccccgagttcatggaggccctgaaggggctgcatgcggatatcgccgccgtcatcgcttatggcaatatcctgcctaagtccgtgctggatgccgtgccgatgggctggtacaacctgcacttctccaacctgccgaagtggcgcggcgctgcccccgcccaacgtgcaatttggaacggcgatccgaccactggtgccgatgtattcaaggtcggagaaggtctggatgatgggccaatcatcgcctcgttgacggtcgagctgactggtcgggagacttctggcgagttgctcacacgattggcggaagagggcgcgcccatgtatgtggacgctttggccgccgtgggtgatggcactgccatattcacaccacagcccgccgagggtttggaatacgcgcataaaatcaccgtggaagatgctcgcatcaactgggctgacccggcggagaccatcgaccgccagattcgtgcatgcacgccgcatccgggagcttggaccgaactgtttgcagaggggttgatagctgacagcggcgaggccaacgaggaatcggcggatcttacgaccgcagtcaagcctttcacattgcacattcttgccgcgcaaccggctgatcagacgaatcccaatactccaatcgacctcgatcccggcgaactgaaggtcggcaagaagaatgtatgggtcggtaccggtaccggcgcgctggaactcacccaggtcaaggcccagggcaagaaagccatgcgcgctgccgactgggcccgaggcgcacgcctctcccccgctgcctgcgtgaggtaaagcggcttcgctcccgccggcgggagagccgtatagcaaaacagcccagtgggctgtttgtaggcgagtgtgagccgtcaggcgaatcagaaaaaacatggccataggccatccgcgattgcagggctcggagagctgtcgaacacagtgagactgagggcggtcgttagggcatctcgctaggaaccatcctcagtcttgcttcgcaagccagctcccaacagtcaggagcaaagcaaaaggtccggtaccttcttcgtgaaggtaccggaccttttcaactatgcaatctgctatcaggcaagaccggagagcttgttgataagctccgggtcacgggtcgcgcccttgtcggccgagcgggcgaaagcagcgtatgccttcaacgcctgggagacatgacggtcgcgatgagccacgtagccgtcgccggcctcaagttcacgacgacgctcgtccagctgctcgtcggtcagctcgacgttcacggaacgggcttcgatgtcaatgtcgatgatgtcgccgttcttgatgagcgccactgggcccttgtttgcagcctcaggagccatgtggccgatggccagaccggaggaaccaccggagtagcggccgtcggtgagcattgcgacctgcttgccgatgcccttgcccttgacgaaggaggtcgggtacagcatctcctgcatacccggaccgcccttcgggccctcgtaacgaatgaccagagccatgccgggcttcagggtgtcgttcaggatgacttcaatggcctgctcttgggagtcgaccaccagagccggtccgcggaacttccagatctccggcggcacaccggcggtcttgaccacgcagccgtcgggggccagattgccacgcagcacggcgaggccgccctcgtggatctccgggtgatcgatgtcgtggatggcgccgttgacacggtcgcggtcgagcgagtcgaacaaagtggtgtgcgtccacggttccggggagatgatgtggccaggcgcggccttgtacatctgctgggcttcctcggtgcaggtcgggcgcatgatgtcccaatcggcgagcttgtcttccagcgtcgggtagtcgatggagtgcacgttggtgtgcagcttgccggcgcggtcgagttcgccgaggataccggtgatgccgccggcgcgatgcacatcggaaatctcccacttgccggagggtgaagccttgcagatgcacggcacagtgtgggaaatacgctcgatgtcatccagggtgaagtccacatcggcggactgggccatggcgagaatgtgcagcacggtgttggtggaaccgcccatggccacatccatggtcatggcgttctcaaaagcttccttggtggcgatggagcgcggcagcacggaatcgtcggaatcgtcgtagtactggtgggcgatcttgacgacctgctgggcggcgcgcttgaacaggtccttgcggtaggagtgggaggcgaggatggtgccgttgccgggcagggccaggccgatggcctcggtcaggcagttcatcgagttggcggtgaacatgccggcgcaggagccgcaggtcgggcagacggtcttctcgtagttgagcagttcctcgtcggacacggagtcgtcggcggtggcgtacatcacgtcgatgaggtcggtgctcttgacggtgccgtcggcgagcaccgtggtgccggcctccatcgggccgccggagacgaacacggtcgggatgttgaggcgcagggcggccatcagcatgcccggcacgaccttgtcgcagttcgggatgcagatcagggcgtcggcacagtgcgcgttgcactggtattcgacggtgtcggcgatgatatcgcgggaaggcagagagtacagcatgccggtgtggcccatggcgatgccgtcgtccacagccatcgtgttgaactcgcgcgggataccgccggcttctcggatggcctcggaaacgatgcgtccgaccttgttcagatgaacgtggccaggcaggaactcatcgaaggagttggcgatggcgatgatgggcttcttgcccatgtcgtctccgctgacgcctgcagcacggtaaagggctcgagcgcctgcaaagacgcgccctgacataatttttgcagatcgcatttcagtcatggttctattcaagcctttgcgagggacacgccacttgtcaagagtcgaatagtggaattttcaaaaacgtaacgtttctcacacataaattttcttggaagaagtcgtcccaaacctctatactcgcttcgttgagatagattttccaagtctggagatatgaataatggcttttggcactgacccgacccctgatggtctcgcaaacccgccgatcgacgacctgatgcagcacgccgattccaagtacgctctggccattttcgccgccaagcgcgcccgtcagatcaactcctacttcactcagcttaacgagggcctgctgcagaacgtcggcccgctggtcgaataccagaacaacgagaagccgctgtccatcgcattccgcgagatcgacgagggcctgcttgaggagaccctgggcgaggacgacaccaacgagggcaactgatttcccgctggcttgggcttgagttagacacttacccgatgcttgccgcatagttgccgtcgatatgctttcgactgatttagggcgacacacttgctcatgttgcggcaatcggctataactcgagttcaggagcgaacgtgttgttaagggctcgcgccaccgtgtggttggcacgagcccttaactatgtgtgcttcatcaataactcaatacataacaatcaacgacgtatcattgtgcctcgctttccgcggggcgataagtcctgaagaaagggatgatatgacagaagaacatcggcttatttccgccgaatccgtgaccgaaggtcaccccgataaggtctgcgatcaaatctccgacgccattcttgatgatctgctggcccaggatccgtccagccatgtggccgtggagacctccgccgccaccggcgtgttcctggtcttcggcgaagtcacgtctgagggatattgcgacgtgcagtccaaggtgcgcgagacgctgcgcaatatcggctacacctcctccgaggtcggtctcgatgccgattcctgcggcgttgtggtggccatcaccgagcagagcgccgaaatcaaccaaggtgttgctcgactgaccggcgcgcaagagaccgccgccagccgtgaagaacgttacgaggcacagggtgccggcgatcagggcgtgatgttcggctatgccaccgacgagaccccgacgttgatgccgctgccgatctacttggcgcatcgcctcgccttccgcctgaccgaggtccgcaagtccggcgaagtgccgcacctgcgcccggacggcaagacccaggtgaccattgaatacgacgacaacgatcagccagttcggctggacaccgtgctgatttccacccaacatgaccctgaggttacacaggattggcttgcggttgagctgaagaagcacgtgattgctccggtgcttgatgaagtgctgggttccaaggtgccgcatgacaactaccgccagctggttaacccgaccggttcgttcgtgcttggcggcccggccgccgacgctggcctaaccggccgcaagatcatcgtggacacctacggtggcgctgctcaccacggtggcggtgcgttctccggcaaggacccatccaaggtcgaccgttccgccgcgtatgcgactcgctgggttgccaagaacatcgttgctgccggtctggcccacaaagtcgagattcagatcgcctacgccattggtgttgccgacccggtgtccgtcaacgtggaaaccttcggcaccgagcagggtgtgacgcgaggccagatcgccgccgccgtgcgcaaggtcttcgatctgcgccccgctgcgattatcgacgagctggatctgaaacgtccgatttatctgaagaccgccgcgtatggtcacttcggacgtacggacgttgagttcccgtgggagaagaccgacaaggtcgaggagctcaaggccgcgattgctggggagtgagctgaattaagctccaattgaattaaacgggtgcctcccacttgttacggtggaaggcacccgtttttcaagcactgctaacatgcctctctattcagaggcatgttagtagtaaacccagtagtatattccagtgcgcagtagcatgaaaacatatctcgcctaaataccaaaggagcctagcatggaacgcgtcagacttgtcgactggctgaagagcgagcgagaccagcatgttggtggaggcctgtactacaactcacagattctatttgcctacaattccaaccacatggaaggctccactctttcaccagaacaaaccgcgcagctgttcaacacgggtgccttgctccccgacaacatcaacgatgaaatcagagcagacgatgtcgccgaaacaacgaaccacttcaatgcgttcaattgggtcttagatcatgtagacgacccagtaaacaaaagccttgtatgcagccttcatggaattctcaaacgcggcaccagccaagaattcgacgccaaccgcaacgtcggcggatacaaaatagtgcccaacgtcatcagccaacttgagggaattcatacggtactccccgcagatgtgcctcttgccatgaaacaggtattcagcttgtactcacaattggaagatgatccttttgcaatcgcaaaagcacattggatgttcgaatccacgcacccattctccgacggtaacggtcgaattgggcgactcgtcatgtttaaagaactcttgcgcttagattccgttccagctctggtattggacgaacaccacaatctttatactcgcgcactaaagaatttcccaaacgaacccggatatctggtggacctgcttcttaatgaacgcgattactatcaacgaatgatcgaaacatacgcaccgaaccgtatccgatactcatacgttgaccagtggaaccaagctggtatcctaagacatctcaatcatcatccaacatctcacgcttgaaatcgtcaaaatcaacctcaatatgcagaacggtatcagtgggcaaagcatgcaacgttttgcccacagcctcagccgaaacgtaagtcgacaaactgtcggcaatcgtcatagccacatcacctttcatcactagtagctttcaacgtatccctacatcctaggacacgtcataagcgcagaccacaagggaatccggcacgtctcagaccaaccgcacgccctttcttgtgtacagatctagtggtgcttgccctctatcccgtcttgagtatcagtatcataggcatcgtcgatgtcgaatccgcctataagcacaaagcgcctcaacatatttgtggcacgcatgcgtactttgaacaccggcaatggtgtgtgatcgcattgctcgaagaaagctttcgctcgatgtacgtcaatcgaggagcgcagcacatcgaagcgcccgaactcgttgatgttcgcttcatctatacgtttggcaaggaactcctcgaccaccgacctattaacgcccagccgatcgactagtttgtcgacttgctcgttcttctctcgcgcagcataacgagtgatgtaatcacgtagcgtcatgccggcttcaacctccacgtcgccacgctccacgtcatgcaggaacagttcggcgagtcgttgttcgtcccgcgagagcgcggcaaaggaacggtgtagctgcgcagacatctccgccaattccgggctattctccttgagcgccttcagccatttattgaagttggcattcatataatcggtatcgatgagtccggtattgatttcggtaagatagccatccaattcatatggcgcttcgggattatcttttacgccatcatctgaatcaccaccgcagccgctattgccatagaacagttctttatagcgttgcgcaagaatgaggtatgtacgttcgtcgatttgaggacgcactacttcagactcgtcatgctcatcattgtcctcattcgtatcgtcagtatccgtactatcgaccttgtattctgtggtactccagtcaaagccctgcactttcgccgcttcaaggtaccggttcagctccacgaactccttggcgaacttgtgtctggcctccaccgattccggcaactgcataaggtccgattccccgttatccgagaacacgtcgagaatctccaagtaccgtgtatccatggatttcacgttcgcgggcagtttctgcacgaacaaatcaagcggcctgtcgccggagtacagtttcaccgccgcttcgatgaagccgtacatggtgtgcggcttgcggtagtagcggatgactccgaacggcttgtccggcccgaacaggcgattcgtgcggctgaacgcctggatgatgctttcatagtcgatgatcttgtcgaggtacagcgtgttcacccatttagagtcgaaaccggtgagcatctggtccacgacgatgagcaaatcaagctgctggctgcggtttgctgctatgccgccgtacggactcttatgcgatagtcgcgacgaaatatctttcttcatcgccggccatgtggggatgatgaactctttgccgaacgcctcgttgtaatcggtgatgatttcagtcagcgcatcttctttgtccgttgctccttcgttgttgtcgatgttgggatcgaacaacgccgttacatgcaacttaggtgcttgctgcttgaacaagtgataatagttgacagcttcaggaatggagctagtggcgagcatcgcatggaatttgcccgcatggctgagcaccgggaactgttcgagaatgtccgagaccaccatgttcggatgcggggagtcgatgccatattggtctcgtccaaggaaatcctcgatgccgctaatacagtttccagcgccatcaaccatcggacccatggggacctcagacttatccatgtaatgctggaatactttggccttgaccgggtcggcgagcgcatcttccgtactctccaccttcgccttgtcgagagccacggcacgtctgacttcagaatccttgtacgtggtcaccatgtacgggtcgaatccgagtacattatggtcacgaatgccgtcggcgatgctgtaccggtgcaagcaacggccgaataccatggcagtggtggaattcttcttctggttttcgtccagaatgggcgtaccggtgaatccgaaaaacagcgcgtttgggaaagagcgacggatattctgcaacatgtcgccgaatgtggaacgatggcattcgtccacaataaagacgatacgtcgttcagctagctgatccagccaggtctgtgtgactcctcgctcccctgttttcacgttgctcatcttctggatagaggtaacgatcagagtgtcgttgacattggtgctgttgagtttgtcccgcaaaacaccggtgttctcggtgccttgtacttccgtctcgctgtcggcaaagctgcggtattccttcaatgattgggtacccagctcgatgcggtccatgaggaacacgactttatcggcgtcatgcgaatcggcgatgagttgcgccgatttgaagctggtcatggttttcccggaaccggtggtgtgccatacatagccgccgggtcgtcctggggtagctggtcgctgttcccaatcacatttcctcaccacatcggagatggcgtttgccgcgatgtactgataactacgcagcaccttaaggcatccatccgctgaatcagcgatggtgtagaagccgatgagctggtgcgccatgggaatggacagcaggcctgcggtaccggaggtgcctccgatgaacagcttccattcgtctttgccagggttttgcccgccgcagataggctcattgttgtagtcagcccaatggaagtaatagcttggattgaatttgtctacacccggattagcgaagtagacggcgtcatcggggttcatggccacaaaaatctgtactagacggaacaggccggtgaacacaccttcgtgcgcatatttctcgatctgattggttgcttggctgaccggtatgccacttttcttgagctcgatatggatcaatggcatgccattgatgagaagcacgaggtcgccgcgccgcgagttcaacatcttgttcttggctggatagaccggttgctgagcgatctgataagtgcttttgccgcccgcgatttccttgcggtcatagatgtagagactgacttccttgccgaaatgcgccacatcttctttgttgtcacgcatgatagacacggtacgcccgttgacgaacgaattgagcgcgagcggcgtccgcagggtctcgatctgctcgattatctgggtcatttccccgtccgtcagcgggtatttgccaagcctgtctatgtcgttgttgttgcggtacagtatgtctttccaattgtcgagcaaatcccgctcagttggatagcgcaggacaccgtccttccatccatgctgcttaagcacggtgatgacgttttcctcaaacaccgattcgctatcgaatatcatgattcttctctccccgaacttcccagtgtcctgcctttcgcgagccgacgcgcttaagcaatccacacccaatgagtatttcagcatcccttcgcacagtcgctgatgagactcccgcagcacgcgccatatcatcgtatgtcgcgctggggctcttctctacaaaatgaagaatgactcgctgtctctcggttatccgctcattcgaaccatttaactgctcattattgtcagttatctgctcattcaaaccatttaactgctcattattgtcagttatctgctcaccacggatgaatacatgctcattttgatcgagcttggcatccggctccaacataagcgtgagcaccgtacgatcagcctcgccgaagctctcctcaatctgcggttcaggaagtcctgcattcgcccatgtggcaaacacatcgggaacacccgtaccagctcgctcgcccacatcgattaggctgaacatcttcatgacaagaccgttgcgcggatcggacaccccgccaagacgcatctgctcaacacccgttcggatatcgcccggattttcgaacaccaatctatcgggtgcgcgtctgaccaccacaccacgcacgccatagtaatcagcgttgaacaaacagttggccaatgcctctcgaattgccttatgcatgggagtgtcatcaacgcggaagatgccattaagtttgaaaggggtcttcagagactcggcaagtttgagattcacgcgaaaaaagaaatcaaagaggttacctgaccacatgccatcgccggaatggacacgatcagtccaacgaatcgtcggatctagagtctcctgataatcaaggaaataatgcggacattcgcgcacgatgtcatagtcgttgccgaacataagcagaccgccgaacgtaggatgaagcttaccgtcttctcggctcaccattgccgcgccaacagcacgcagaaaacgctcgtcatcgagatcggtccaagaactgccctgacgtaccgcacggaaacgattgcgatatgcccgcactgtgtctgtattgaagtcggcaacagtgagatcgtccagcaccttggaatccatcgtctcagctccctgatcccggagcattgctgagatctcctgccgcgtgcaacggtagtcgccctcaccacgccgacggtaggttcccccgaagagatcattattgatatacacggggcgttcgtcacgcggagcgcgcggaacgtgaatagccagcaccatcccaccatccgcttcgagcacttcaacttccgattcgatgggcagcacggcgctcaccttggaccggttgctgaccgtgttccaaaagtcctggcgaagatgttccgcttccactggtgcgagcccgactgtttcaaatgtgccgtctccgcgttctttgacaccaagcaggatgacaccgccataggtgttggcgaaggcggaataggtctcccacatgctgcgtgggagaccgcctttcgctgctttcgcttcgatccggttattctcgcgatatgaggcgagcttcacgatatcgaatgtctccattgctctacctcccttcacacaaacatcttgtcaagcaaggatttcttgatattctgcagcaattccaacttacgctgatgaagggtgatgaggttgtctattgagtcaatcgccgctcctatagctcgctgctcgttcaaggacggcaccaaggtcaactcttcgaggaagtcggccgtcacaagctcatgcatcatagtggatgcttttgtggagcgcgttaaaacgtccttcatcagtttctcgttgttgatggcatgcttccagtaagagaggtcataattgtcgccaacatgccgaaacaccttgaagacgtgggaaactatgccatcgccaattgtgttctcaacgaagcggccatgggcaaaacgcttgcttcggttgccttcaaaggcaatatcaccaagacgcattacattgtaggttgcaagatatgagtcctcggttacatacacggcagggttgaagtacatgtttgcaacggaaatagccttatcacgtccgaagctcacatcgttcttttcagatacgggtcgatatagctccccgaacttacgctgttcccaagggtcagtaaaaccagcgaaacgaatctcgggtacagactcgccatctttcgggaacattttttcaagcatcgattttttgaacacgacgagcttgtcatacttacgctgatgaagggtgatgaggttgtctattgagtcaatcgccgctcctatagctcgctgctcgttcaaggacggcaccaaggtcaactcttcgaggaagtcggccgtcacaagctcatgcatcatagtggatgcttttgtggagcgcgttaaaacgtccttcatcagtttctcgttgttgatggcatgcttccagtaagagaggtcataattgtcgccaacatgccgaaacaccttgaagacgtgggaaactatgccatcgccaattgtgttctcaacgaagcggccatgggcaaaacgcttgcttcggttgccttcaaaggcaatatcaccaagacgcattacattgtaggttgcaagatatgagtcctcggttacatacacggcagggttgaagtacatgtttgcaacggaaatagccttatcacgtccgaagctcacatcgttcttttcagatacgggtcgatatagctccccgaacttacgctgttcccaagggtcagtaaaaccagcgaaacgaatcgcgggtacttttgcctgttcagccatcattcgcctcccaacagggtcttcagctcggcaataccagccatgtcaaactcattgccggttagttgaccaagcatattgccaagttctgcctcagcctgttcgatctgttcgcacacatcggagtaggtagtcgaatacttgtcgttcagcgcattcaccgctgcaatcaactcatcaacagccgtctgagggagctcctcaagcttgcgctgcaatggttccacccacttggcagcaagcaagtcatcagcatgttcatcgctcagtccttcaataacggtccgggtcttttcatcaagcgctgaacggagattcttaacgttctttttgacttcacgctcttcatcaaacaaccgctgtgcactcacaagagcacggtcaaagtcagtctcgggattcttcccaatcgatttcactgctttcttcaattcagcggcaacgaaagaatctccatcctcgctgacggcatcagtcgaactcttgtcatcctcatccagattatcaagaatgtcagcgatttcgccgccaatctcactcagccgagattcaaatgtggcaatttccgcaagatcagaggtaagaaatttcccctgtacgagatcgaacggcaaaatatgcccagcccagccgtccggcacttcgacatccttaccgcctttcttcttgacgaccatattggcatcgactttgcgaacggcgtcatgtccctcggcctgtatggtttcaaggtcgatggagatagtcttttgccaactatcgtcaagcacctgatacgccgcataggcgtctacgagagggataccatccaaacgacgcagcagatcatttgccagagtctcctcttcggcggcaatgctcacattggcggcattacccaccaattcaccgcgtatataagccggataatcgatgaacgcctcacgataacgctggatatatgccttcacatctgagtcggcattcaccgcctcacgaacgtcttgcacggcgagcttggccgaatggccgttctcctccgcgaaaaggcaccggcgcagtccggggaacacgttccaatatttgctgagtgcatcgatgtcccgcttaggaatgccgccgaacatagtggaatacacatcccagctctcggcattgtcagaggaatccacgtagcgaggaatattgaggttatagtcgttctgccgaatctcatcaatacccaccaagcggctgaacttatcgacgtcacgattccctgtcaccgcatccacgatgcgtttgatatcgctcgcacgcagcttgttgttcttgccttccttggtgaagtatttggaagcgtccacgatgagcacatgatcgtcgtcgcgatgtttgcgcagcaccatcacgatggtggggatgccggtgccgaagaagatgttcgcgggcaagccgatgatggcctgaatatggtggttttccactagattccggcgaatagcgccttcctcaccgccacggaacagcacgccatgtggcaacacgatggtcatgatgccgtcgtcgcgcagatggtagaggtcatgcagcaggaaggcgtagtccgccttggacttgggcgcgatgccgtattcgaagcggatatcctcgccggcctccggcggttcccaattctgggagtagggaggattcgagaccacagcgtccacgaacagcggctcataggtctcatccttggtctcgtcagtgtcgaaccacggccagtcatttttcagtgtgtctccgttgcgggccacgatgttgtccggcaggatgccgcgcatgacaagattcatacgcgtgagattgtaggtattctccttgagttcctgtgcgtaatacttgatgtcattcggattgccattgcgacgggccacagcctgaccgatatggatcagcaacgagcccgagccactcgtggggtcgtagatgttgatttcttcacggccggcgagataccaagccactatttcgctcatgagctgagagacttcgctcggagtgtagaactcaccggccttcttacccgcgttggaagcgaagttgctaattagatactcatagatgaagccgagggtgtcgtagtcctgccggctgtccatcggaatgtccttgatgaggtagatgaggtcgcggacagccttgctacgacttttttcatcggtgccgagtttggacagaccggtttgcagcgtgtcgaagatgccgacaaacacacgtttacgagccggatcaatgttgcgttcgaaagcggaaagcgcgtcacgtacatcagcgatggtgaaatcgccctggctggcaatccacgtggagaacaggttgttgtaggagatgaagtagccacatagatcacgtacatactgtacagtttcggcatcattctcatccaagcccttgaggtcttcggctccccagtcttcagcacgcaggcgagcaatctccgtctccgagaggaacttatagaagataaagccgaggatatagtccttgtattcattcgcctcaatcttggaacgcattttattggcggattcccagattttggcggcaagctgctgcttattcattcatatgctccttgtttctgtacacgtaatcaagggtctgtccttgttcattgacccattcggtccaaccgttttgactgccaccgagaacaaatacagcagcagtggaagggcttgacagttcaatgtcatcagcaagagtcgccttgcccgtctgcgttccgaaaagatgctgccgagctgccacggctccctggtttttaataactggatgcacgagatccacttcagaaccggaaagaacagtgaaacgacctgtaccttggctatatcgcccagtggcctgaacaccgttcttcttcgtatggaatacggcgttcaccataaccggcgtcttttcttttcgatcaaggtcatatccgagcactcgcatacgaaagaggatgttattgtgcagtctttccacctgttgctctttgtatggattcatgcgaggagcaggagtatacccattgtcggtctcataagagccatgtttgtccacataatctatggctgttgactcaagagagtccaaaacatcacgatcgatattgacatcattatcgaggaacatgatggctttgttccaaaaatctttcttagtcttgtgcgcatcaagccgactaagccccttcgtggtttgtcccacatacgcacggctcagaactccatgatcttcatcaagaagataatacacaccgcgatccggcaaatcgggaagacttttcgcctcactcaacatatcccggggcaccacaaccgtgacaagcgactccccatccacacgacaaattcgaatgccatcaggattgttgtcaataatttgtatggtcatagcagtgagagcaatcattacttgccgccctttgctagttcattaatcatgcatgttctcacgaatgccgaaaagctcatcccgcgaagagatgcggcctctttggcagaatctcgcaaattagcggggatacgcatagtaaccggcaccacatcaccgtttaccagatacgaacgtatctctgtttcaccagcatcatgctcaatcagatcggagtacgtcattgcatcctacactttcaaactgcaatacaaatgcaataattctacacccgcttgggaacagcgtcagttgggggagctggtgactacgactattggcggcggcactcccagtacgtcaaacccggcgtactgggatggtgaaataccttggattcagtcatctaatgttctcgaggacacgctgtttgatgtcgatattcctaaagccattacccaaaaaggattggaagaatctgcagcgcaaatcgttccagaaaactctatcgccgtcgttactcatgtcggtgtcggaaagcttatctacctgccatttcagtattcaacgagtcaagatttcatctcgttatgtgggctaaaaggcgatgcgcgatatacctgctatgcgctatggaaaaggcttcaagaagaccttcatatcgttcagggctctgcgattaaaggaatcaccaaagaagacctgctcgagaagaatttaccaatgcctagtgttgaagagcaggcacagattggcgttttattctcgcaactcgataacctcatcacccttcatcagcgtaagcgtctgtggtttgctaaataagggtggataaggctctcatcacgatgtcaacgtctttgttttccaattcgcggatgacatgcagatatatttcctgcgttgtgttcatgcttgcgtgcccaagccgtttagagacgcttgcaattgaaacgccggcaaatagcaagagtgaagcatgggtgtgtctcaatccgtgtattgaaatcacaggtactccggcttgtttgcaatgccgggccagaataccgttggcggttgagttgtataccttgccatccacgaagataggcttgtcaccgggtaagctcttcaacagaacagacaactgcatgatgagttgccagtcaagttgtactttacgcaccgaagaagcattctttgttggaacaaagccacctccattcttgtaattccatgtcttattgacggacaaagtctggtgaacgaaatcaaaatcatcaggagtaagccccaatgcttcggagaaacgtaacccggtttttgccactagcagtatcaaccaatcccagttaggtatcggatcaagcttcaaatcagcaaggacagcatgaagttcgaactggttaagatatttcaccttcttctgtctcggctgttttcctttgatgattgcttttcttgttgggtctctctgaatcagaccttcatcaacggcatcgaggatggctcctttcagttggtgatgaaaatccattgttgtctgatgctcgtgatgctcagcgtatccgttgatgagtttctgatagctcacacgatcgaactcggaaagcttgagatcagggataagttttctcagccacgcctgtgtgagcttgtatttcttcattgtcacttcccgaatcgcgccttccttgtagacgtcgacccattgcgagtagtaatcgcagaacgacatttcttcgttgattgtgtttatgaccacacggggctcctttgccgaatagatagacgcttacgctgatgaagggtgatgaggttgtcgaggcgagcgaagaagaggccgattagctcctgttcctcccgcgaaggcggcaatatgagagcggtatcaaagaaatcgttaggtgcgatgttgagcaagccgtggttcctcgcgccttcggcggcaatcatctgaacggctttgtaccagcggtcagtttcgtagtacgtgacgaggaagtcagggtcagcgccgtctagcccgaagcagatgtacagggtcgatacgcagcccttttcatatcttacgagacgctttaccgcgccccacggactgtccccagacgtgctcttgttgtaggcgaactctcccttgcgtaggagataatagccgctcatgtccttgcttgcgacctggttgttgaagaaggttctctgatccactaggccatactgggacgagatggtcagaggcaaatctgactcgccctcgttcttgcgagtgacgcggtttgcgatgtcttctaacttacgctgttcccaagcgggcatcggcactacatgaagcagggcagacgggatacgagtggctggccgaacatacgcaatacatctaccggcaacttgggcactatcatttccgttgttagctacacttatcgcgataagtgtagctaacaacgattgaagcgacaccttacaagccatgagaggtagaaccgttcccccctctattttgaaaaacttgaataagttagttttttcaaaatagggatgcgtcgaaaagacgcataaacgcacgaaaaatgcgggcatccgatatgcagtgttcattgaatcactgtatatcggatgcccgcaattgtttcagaccaattgaagagccttagctcagcatcagcctcacgcctcggcgacctccacgcccagctcggcgccttccttcacttcgaaggaggtagccagtgtctcgtgggcgatcagatccttgaactgctcgaccttggccacatcggcggccggaacggtcagcaccagggagatgcgatcggcgatgtccagatcggcggccttgcgggcgtcctgcacggcgcggatggcgtcgcgtgcgtagccctcggccagcaggtcgtcatccagagcggtgtcgagaatcacgaagccaccggtcggcagagcggcggacaccgaagcagcggcctcggcggcattctcctcctccacacggttgatgagctcgtactcgccttcgaccagttccaaatcgccggacggcgtggaaaccaccggagcgccggaagcgtttacgctccagtcgccggacttggaggccttgatggcgaactgcacctgcttgcccagacgcgggccggcagcgcgagcgttcacgcgcagctcgtgcacgatcttcagaccctgggaaccagcgtcctccatcgtgcagaattcgatatccttgacgttgagctcggacttcagcaactcgtcgtaggccttgactgcgtccacatcctcggccaccacagtgagcttggcgagcggctggcgcacgcggatcttggcggccttgcgcagggacagagtgccggaaacgacttcgcgcaccttctccattgcggcgaccaaagccggatcgtcaaccagcacgcgaccaagttcggtatccgcaccggtcttctcgtccaccacatacggccagtcggccagatgcacggactcgccaccggtcaggccacgccacacggactcggcttccatcggagcaagcggcgcaagcacgcgcatgaacgcctcaagcacggtgtacaacgtgttgaacgcgttcgcatcctcgttccagaagcggtcgcgggtgttgcggatgtaccaattggtgagcacgtcgatgaagtcggacaccacatcgcaggcgtcagaaatcgcaaactcgttcagagacttctccacacgctccaccaggcggcgggtgcgggccagcagatagcgatccatctgcggcaggccagcgacctcgtcggcacgcagctggcgggcgtcgaatccggccccgccgttggccgcgttggcgtacagggtgaagaagtagtaggagctccacaccggcagcatgacctggcgcacggtgtcgcgaatgccctcggcggtgacgatcaggttgccgccgcgcagaatcggcgaggacatgaggaaccagcgcatggcgtcggaaccgtacttgtcgaacacgccgttcacgtccgggtagttgcgcaggtgcttggacatcttctggccgtcggagccgagcacgatgccgtggcagatcacgttcttgaatgccggtcggtcgaacagggcggtcgccatgacgtgcagcaggtagaaccagccacgagtctggccgatgtattccacgatgtaatcggccgggaagtgctgttcgaacttctccttgttctcgaacgggtagtggaactgcgcgaacgacatggagccggactcgaaccagcaatcgagcacatcagagatacggtgcatgtgcgatttgccggtcggatcatccgggttcacgcgcgtcaggttgtcgatccacggacggtgcatattgacgttgccgtccttgtcgcgcgggtagtcgccaaagtcggccttgagctcttcaagcgaaccgtacacgtccacacgagggtacttcgggtcatcggacacccacaccggaatcggggaaccccagaaacggttgcgggagattgaccaatcacgcgcgttggcaagccacttgccgaattggccgtccttcacgttctccggaatccagttgatctgctggttgagctccagcaggcgcggcttgatcttggtcacggacacgaaccaggaggacaccggtttgtaaatcagcggggtggcgcagcgccagcagtgcgggtaggagtgcacgtagctcttctcctggaagaggatcgcgcgctggtcttcgggaatctcggcgagcgggccgtcgccggcacgcaggttgcgcaggatcggcaggttcgcgtcgaacacgtacatgccctcgtattccgggcactgggaggtgaagcggcagccggcgtcgagcacatccgtgctcttgactccgtgcgcgttcagcgtgttcatatcgtcctcaccgtagggagcctggtgaaccagaccggtaccttcgacggtgtcgacgtagtcggcggtgaagatcgtgtagccgttcgggccgggcacattgccttcggtctcggccttctcccccgcgaagtacgggaagaccgggtagtagcgacgaccagccagctcagagcccttgagctcgcgcacgacctcgtagttctcgccgagttccttggtgtagtgctcaagcagcggcttgccgaagtagaacttcttgccggcgaacttgccttcggtcggacacacctcgacataatcgatgtcggcgccgaccacgatggcgaagttggtgggcacggtccacggcgtagtggtccagaagacggcgtaggcgtcttcctcatcacgcatcttgacggccacggacacggtggtgtcctgacgatcctggtacacatcggcatccatgcgcagctcgtgcgcggaaagcggcgtctgatccttcgggcagtacggcagcacgcggtagccctggtaggccaggcccttgtcgtagagctgcttgaaggcccacatcaccgattccatgtacgggatgttcagagtcttgtagccgtgctcgaagtcgacccagcgggcctgacgatgcacgtagtcctgccattcatgcgtgtacttcagcacggaggcgcggcaggcgtcgttgaacttgtcgatgcccatcttctcgatctggtcgaccgagtcgatgccgagttccttctgagcctcgagctcggcgggcaggccgtgggtgtcccaaccgaacacgcggttgaccttgcggcccttcatggtctggtagcgcgggatcacatccttggcatagccggtcagcaggtggccgtagtgcggcagaccgttcgcgaaaggcgggccgtcgaagaatacgaactcgttctggctgtggtcgccagaaggattacgctccaccgacttctggaaggtatcgtcctcatcccaatagttaagaacggtctcctccatttgggggaagctggggttcggcgccacgtgtgcggtctcgccgccctcgttcgccttgggatatacgttttcgctcaccgtaaatctcctagttgtactgtgcactggtcctacaggagcatcattggtggcgattgattcaagtggccgctttagtagtcgccccgcccgaacccatcgtcagatgatgttcctgcctacgaggacgatgacgagcgttttgtacgctccacaccgcggtaccacctcgcttatcgcaccggttgcgctccgccgaactgttgcactcaacgcagcgcggcccgcacgaccgcttgtgttcggctgtctcgggccgatcccgtcggttctacttggcgattgccgccgttcttccgaagactccccgctgataacggatcactgcctcacaacggtgcatatcctaacacgccacgcggtcaagtctgcacgaatgttcactgagagacgccgtcgaccgcgaaccagtgaatgttgcagacatttctgtatcagttatcagtcatgcagacatatccgtacaagttatcgccgatttatagccataactagacggataatgactgcatcccgttaatccaacaggttatgtctgcaaaatccaccagtacaacaacggattacgtctgcattctcttatgatcagtccaattcgttcccgcatagcgtctaaatggacgtgttaggtctgcatccaattcacggcctgcaagactctgcactcagcaattacttcgtaccaaaccgctcacgaatctgagcggcagtaccataagaggcttgcgcgccgaacccagtcgcggcgtacgcggaaacgtatgaggccaactgcgcactgtccgccaacgcatgacccgaggcaagtccggccagaaccgtgcccataaaggcatctccgcacccggtagtgtcgatggcctcgaccgcaactggcgcaatacgatagatatcatcaccatcgatgactaccgagccatccccgccaagcgtaattaccgcctgattaaagccgaagtcatgcatctgccgcgccacatcagaccagtccagtccatcccaatcgtcatcgtcaggctcggcaatgcccaacagctgtgccatttcatgttcattgaccagcagaatgtccgaagcctcgataagttcagcgggtagttcagcaacgaatggcgaatcgttgagcaataccttaagcccggcatcatgacagagacgagcacatgcggtgacggtttccatcgggctctccaaacacagccccagcacatcggcggcaaccaatgcgtcagatgactggcgcacatagtcgacagacacctcaccattggaaccagccgaatatacgatggtgttctcgccatccgcatcgacggtaatcaccgtggtgccgctgggacctgcaacggcagcgatatgcgaagtatccacaccagcatcgcgcaaatgctccagcaaaaaatccgcattggcatcttccccgactgcaccaaacatccgcacctgcgctccaattcgtgcagccgccgatgcctgattcgctgatttgcctcccggcaataaggtcagcgggccaccgttgacggtctctcccggtttcggcaaccgtttcgtagttacggtatagtccacattcattgaaccgataaccgaaattcgtgaccgagatgcaacaatatcgtctagtaatcccagcacatcatcgggaacaaacttgttgtcaattaacgtcatcactattgtcctttcgtccgcaattcgagccaaccacaatcagaacggcacaccacagcggaagatcacgttggagtatgaagtagtttcgccggtgcgaatcacgaatttcacacctttcaccttcgctttgaaaccgttctcaccatcgtggggtacgcagctcaacggcacatcaaatcgatcttttacccattgctcggcaattgttccacgagcctcctcagccattaacccctcttcaagtaccaattcgggggcaatggcatccagcacctgctcgaatcgcggcacaccaaatgccacagccaaatcgatgacttcaatacctggctgtacaggcagaccggcatcagagaccacgaatctatccttatgccgcagaccggccaaagcctgtgcaagttgagcattgatgacaccatgagtaagcatgaattctccttttatatattcactacgttgtgcgatatgtcggtatagatatggcccaccatcatagttatcgatgatgatgggccatgttgtaaggggcttttaattcccggatgagttatctcatattgtcactggaaatcagcgacgttctccttggtcacggtcttcacttcaatggactcggtcttttcgacgctctcgcccttgatggccttaaccgcagcctcgacagctttcttaccaagctccttaggctgctgtgcgatagtgcctaccatggtgccattcgacaccgctttaagaccgtcttcagtaccgtcaaaaccgaagatcttcacatccgcaccggccttggaaccaagtgactggatagcgcctaatgccatttcgtcgttttcggcatagatgccaacgacatcaggattggactgcatcaggttagtagtcacatccagcgcctcggcacgatcgaagttcgcggtctgttcggccacgacttcaataccggagtacttcttgatctcctttttgaagccgtcgccacgatcgcgagtggaggcggcacccggagtgccctggagaatgatgaccttgcctttttctccgactgctttggccagctcatcagcagcctgagcaccaccagccacgttatcggaggcgatgtgcgaggttacatcttcaccggtgacggaacggtccacggagatgaccggcaggctggaagacagcaacggggccacggcaggagaagcggcatcagaatccacaggattgataatcacggccttggctccttgcgattgggcattctgcgcttgattttgctgagtggaggagtcgttctgagcatcggacaccatcaaatcgacaccaagatctttggcagcggcctgagcaccatcacgcaaatcgacaaagaacgggttgttgagcgtggagaccagaagcgcgaccttatcgccgccgctggaggacgtcgagccgcaagcggctgtacctgccattagggttcctgcgcatgcaatcgcgagtgccgcacggaaggtcttcttcatagtggaattcaacatcattgtttctttctcttgtagttattggataaatgggattgaagatttggcttgttagttgaaacgcctttcgacgtgatcagtgggcatccaccttgcgacgcagggtatcgaagctcaccgcgaaggcgatgaccagaccgataaccacctgctgccagaaggaggacacattgagaatattgagaccgttgcggatcacagcgagcaggatcgcgccgataaaggtgccagaaatcttgcccttgccacctgatagggacgctccaccgataaccacggaggcgatggcatccatttcatatccggaagcagcctgaggttgagcggaatgcagacgaccggcaataaccagacctgcaacagccgcgaaaatgccagacagcacgaacaccataatctgggtcttatgcacggagataccggagagccgagaggcttccatattgccgccaaccgcatacatggaacgaccaatactggtgaagttcagaatcacggaggcgatgacgcccatgatgatcatcatgacaattgggatcgggataccaagtaccgtgctgccgaaaaaattgaccatatcggaagtggaaaccggtcgcccatcggaaatgaccaaggtcaagccgcgagcaacggacatcattgccagtgtcgcaatgaaggaaggcaacttcaggaacgcattcgcaataccggaaagcgcaccgaatacagcaccggttacgagtccaacaacaatggtgagaatcggaggcagccccatcgaagcgccagtgtaggcaaccaacatactggatacggcagcaaccgagccgacggacaagtcaataccagcctcgacgatgacaaaggtctggccgaatgccagaatggcgacggtcgcagcctgaataccgacattcaacagattcggcccggtcaagaaagcaggagtcgcgattgacaatatgatgcaaagaataatcagacctatcaatgcaccattgcgcgatgcgaaacgcttcactttgtcaagtgtgctgacgctgccggaatcgtaaccgagtttttgttctttagcggtcatgatagtgttctccttcatttctcaacgtttgcagtagtgttttcactgaagtcctcgttcatatgggaaacggccagtgacatgactctctcttgtgtggcctcactggccggcatttcgccgctcagcttgccgttgctcatcacgagcacgcgatcggacatgccgagtacttccggcagatcggaagatgccatcagtaccgcgccaccattggcggtaatctcgttgatcagctcgtaaatttcgactcgcgcaccaacatcaacacctctggtcggctcatcaagcaacagcaccttcacgttcgccatagaccatttgccgaacacgatcttctgctggttgccaccagacagggagcctgcagtttggtcaatattcgccatacggatacgcagtttcctggcggtatcgttttcgcggtcgcgttgccctttaagatcggcaaatccgaatttggaagtcggcaccatagtggcgagacccagattgtcagcgaccgatgcttcaagaatcaagccttgcgtgcggcgatcttcaggaaccagtcccaccccagcggcaatggtcttgtcaatggaagctttaggaagttgaacaccctccacagtcacggaaccagaatcgtatgagtcggcaccgaaaacagcacgcagcacttcagtgcgaccagcaccgaccagtcccgcaagaccaacgacttcgccggcatgcacgtcaaaggaaacatgctcaatggctccggcacgagtcaaatccttgacttccagcagcgttttacctggctgctgagcgactcgcggatattggttttcgatggagcgcccgaccatcaatcgcaccaattccgattcaggagctttcgcgtcaatcgtgtcgatatatttgccatcacggagcaccgtgaccacatcaccaacacgtgcgatctcatcaaggtggtgcgagatgaataccatacccacgcctcttgccttgagctctcccatgatgacaaacagctgctcgcactccttgcgcgtcaaagccgccgtaggctcatccagaatgagaatcgaagcgtcctgcatgagcgctttggcgatttccaccatctgctgacgagccacgccaagctcacccatcggcgtggaaacatcttcgttaaggccaatcagcttcagcgcctcacatgccttgcttttcatggcgcttttattgataaagccaaccttagtgggcagagcacccaaaaacagattttccattatcgacagctcaggcaccatgttgagctcttgatggattaccgcaataccaagcttgcgcgcagcttccacattgggaatgcgcaccgtttggccatcgacctcgatatgccctttatccggctgatagataccgctcatcattttgatgacggtcgacttgcctgcaccgttttcaccaagcaaaacatgaactttgccgggttccacggtgaccgacacgttatcgaccaccgtggagttgccgaatatcttcgacacccctaccagagataactgcgtcatacgcctctcgctttcgtcattgggccgacgtcactgccggcacaaaaccgcgacacatgtatgcgtcttggtcaacgctgaatcgtctcatcactgaaatgatttaacgtttaatcacttgcgtgattcataatatatcgtttaatcacaggggtcaatcagcgtgtcgagagcgttaacaattgcgtcctaacgccattaccagcacatcagaaacacaatatggcacaaaaaaaagacaaaatattggcggcgacggactattgagccgaaaccaccactctggcaacagaccctcgtgataaatacacggtgggcacatgaatggtactaccaccttggtgcacgccggattgcatggcctccaacaacaggtcgacgccttgacgccccatctgctccgcctgctgggaaatgaccgagatttttggcgtcatcaagcgaaaaggcgcaatatcgtcaaatgatatcaacgacatctgagcaccaagctcaataccgcgatcgtgcaataagccgatgatggtgatggcatcaggtgaatatgcgcagataatggcggtaacgccgcattcaagtaaataatcgacagtatggcatcgcgattcatacgtcgaaccacaatccacaacaatgcccgtgtctccatgcagcagctccggagcggcggtccggaatgctacttcacgttcattgacgctatatgattccaacgaggaatgcgctatatacccaatacgtcgatgtccgagagcgaccaattcctccatcgcctcgcgaatgccggtgtaaggatccgacactacaaaaggaaccgattcaatcccctgtacacgtcgatccacaaagaccaacggcaaatctcgcgcaatcaacgatctcacacccggggagtcagatccttgaggaaccacaatcgcaccgtcaatacgctgccccagcaagttcttgatgaatgcatcctgtcgttttacggtttccgccgacgtgccaatgagtgtagaaaatccatgtgcatacaggccctcttccatcgacgagaccaattcggcaaaatatgcgttgcgcaaatccggcaccagcagaccaactgttttggtagcggacgaacgcatagatcgtgcacgctgatcaggcacatagcccatttcctcaactgttttcagcactaattgacgagtctcattggagaaacggcctttatcgtgaagaatctgagagacggcagcagctgacacaccagcctgctgggcgacatccttcaatgtcacgaatgccatatccgtctcctccttgcggcttactgcagcgttagaaatgcacaattcaaatgtacccttcttataaccgacgcccgcaaggtcgtgtcatgcgtcaaactcttttactgcagacatttttgaggcttctgctgttttcgtgggttagctgactggttccggtagtcggatgtcgagtccgccgcatctgagcatgatcaggctgatgaggttggtgacgtggtggaagccgtaggccacgcggacggtgaccttgttcccgttgtcgaacgcctcgagcctcgcgttcggatagccaggcccgattgtcctgaggacgtcgggacgccggcgtctgatcttcccggccggttcgacgatttcggggatgcggctgcgggacgcccgggacacccaatgcttcagttcgcccccgcccgtccgatcgggcgtccgagcaaaccgcgcaggagttcctcgagctgccgggctccgcccacggcaccgatgcgacgaccacgccgcacccggggcagtcgacgcgcggcatcatggcgaccggccccaccctccagcagccgaaatcccggtgccgccaacggcgcacgccgccgccccggccataaccacgtcgtttccgcccgcagcgcgagcagcgcggcgccgccttcccggcgcgcacatggacctcgagcacgggctcaggacgcagcgggccgtcgacgatcctcgaggactcgacgaccatgcctttgacgttgaggagacgtttgaatatgccgttcatcaggcgttttccgcggttcgcttctttggtcggaaaacagaatacgcggaaacgccccctacgcttacgaaaccaacggctcaacgacgaacccacacccacgaaaacagcaatagcgccacaaaacaagcgtccgcaagttcctcttgacgagtggcattgtccaatacggtcactcggcgcggcaaagagatgtgacgagagccggcggtatagccaagccattcactgacttcgataatgcggcggcgagtctcttccttgaccgacaacgtcgggtcgccattcaataaccgggataccgctacctgcgaaaatccggatttctatgcgatttccttcaccgtgaccatgacagcatctcccccaatgcaaacgttacgtagtacttcagtaaatgactttactacttagcgtaacgcacgagacccgcaaccggaatacaccggtcacgggctttgcgatatcaatatcacatcagcagacgatatgacctgatgtcagctctcgtcttcggcgacgcgggagcggctgtagatcatcttcatcgagcagatgaagataaccatcgcacccaggacgatgatgccgccgaccatgaagacgttggcataggtcgaggccggaccggattcggtgccgaacagcgagccgccgctcatcgcgccattggccatgagctggccgaagatcgcgacaccgaccgaaccggtgatggcctgcatcagatcgttgaagcccaatgcacgtccggattcctcggcctccacggtcagcgttgcggtatccacaatcggctggtagaagaacgaggtgccgaagtagtagatgcacggcgccacggcaagagcccagatctggcccatcggaatcaggaacgcaacggcgatcaggccaccgcccatgcaggcgagcgccagaatgatggaggccttgcggccgatcttctggataatcgggccagcggcgaagcccatgatggcggcgaggatgatcgaccacaccagcaggttggagacctgggaggagtcgatgccgtacacgttcaggccgatggcgttgcagccggcgttcagggtgtagctgaagaagtagccgacaaagatgacgatcatggtcatcgcgaaggccgggttggtgagcatcttcggggtgatgaacggatccgcggccttgttgatgtagaccacgaaggccacgccggtgaccagcaccgcgataccccagaagatagtcatgtcggtgaagaacatggtcaccgagccggcgaacaggccaatgagtgtgaagccgatcacgtcgatgcgcgcgcccttggcatgctcgtcaggcaggttcttggccaggatcgggatgaagaacaccgcgatgatgccgataccgaagaggatgcgccaatcgacaagggtcatgtagccggcgaggaagacacccagagccgcggcgatacggaacacggcgacgaacacgccgtaccagatgactcgcttcttcttctcgatgtacttggagacgagcaccaggaagatggagccggagacctgccagcctgcggactgcacggtacgggcggcgatgacgatccagatgctcaggtcgccgaagcagccgaggatcgaaccgagcacgaacacgatcgtgccgagaatcatcatcttcttcagggacacgaagtcgccgagagaaccgtagatcacgcacacgatgccgagcacgatgcccggaatcgaggtgatcagcggggcgaggttggcctggccgagctggtcgccgatgttcacataaatcatgccgaaagcctgctgctgcagcacgcccatggtgaagatgatcagtacgatcgggatggcgatctttgccatcttgttcatacgggcaaactcttcggtgccctcctcaggcaccgggataccgttcgccttctccttgacagcggtttctgccatggtggttcctttctattggtttgagtttggtggaatgccttatgcgcgagcgcaaggagtaaaaacagctacctcctctcgcatgggaatcgacggcgccgcgcctcttctggataccgcgagggccgaggccttcgcggcggaatcaagtgcatgggcgatgggttcgccggacatcaggtcggcaaggagataaccggtgaaggtgtcgccggccgccgtggtgtcgaccgtgtcgacgagataagcgggctgcgtgacgacgtggtccccacgcaaatacatcgaaccgcgctcgccgagggtgagggctatatccgcccgggagaaacgcgcacgcgtcgcacgaatcagtgtctccccgtcttcttcggcccctgtgagcatcgccgcctcgccctcattgagtacaaaacagccgatggcatcaagatcgacttcgtcgagccgcgagtcagccggcgagggattgagcacgatgaacatgccgcgggccttggcgcgggacacgatatagggcagttcgctgatttcgttctgcagcagcagccaatcgtccttcccatacccgtcaagcacctgatcgacgaaatcacggtcgatggcacggttcgcgccggggtacagcacaatgcaattgtcgccgctggcatcgttttggatgatggcgttgccgctgcgcacatcatcgcgcactaccaccgaggtcacgcccaccgcgcaggattcgagcaggtcgcgcaggaacatgccgtcccgtcctacctggccggcatggtgcacatcggcgccggcacgagccaatgcgatcgattgattcagccccttgcccccggggaacacgtcgagcgaatgcgaggtgatggtctggcctttggccgcaaagtgatccaccccgtacacatagtcgatgttcagcgagccgaaattcagtatgcgcatcaggactcctttcccatgacgggaccggtgagagccagttcgtagatgcgacggcaatcgtcgcgatcaaggcgggcaatggatccgatggtggcgtccggcccgtagaaatcgatgttgtccaacatgcgttcgatgccgtcgcccggcagatcgaagtccttgaaggaaacaggcatgccgagcgagcggaaaaacgattccgttgcggcgatgccacgccgggccagttcggtttcgttcatcgagccgggtctggtgccgaatacctcagtggcgtatcgcgcgaaacggaacggggccttctcgctagccacgcgcatccacgatcccatgatgattgacagggtggccccgtgaggggtgtcgtatagcgcgctcagctcgttggcaatcaggtgggtggaccagtcctgttcacgacccacgccgagggtgttgttctgcgcgatggtggagatccacatgatttgcgctcgcaagtcgtaatcggcaaggtcggccaacgatttcgggccgatatcgaccaaggtgcgcaatgcgccttcggccatacggtcgatcacgccgatctcgttgccggcgctgaaataccgttcgcagatgtgggagaacatgtccacaatgccgcaggcagtggggaacgccggcaccgtgacgctgagttcggggttcatgaacgcgaataccggccggagcactggttcgctcagcgtgagcttggaatgctcatgctcattgttgatgacggcgacctggctggattcgctgcccgatgccgggcacgtcagtaccaccgcgacgggaagggtgcgctctaccggcactttgccggtgaaataatcccatacgtcacgctctccggcagctcccagcgcgattgccttggccgaatcgatgacgctgcctccgccgatggccacaacggcgtcgacattgcgggctttggcgatggcgatgccttcacgcaccagcgtcagtcggggattcggcttcacgccgccaagctccgtgtaggaaatgccggcccgtccaaggctgtggcgcacggcatctagcaagccgctggtttccaaatatgctccgccatcatgatggatgagcacgcgggaaacgccctttgcgcccagttcgtctcccactttggtttcggcgtcgcgcccgaaaacaaaggtggttccgatgcatatggtgaaatccctcatatcatgctccttgcgtgtatgacggtgtccgtcatgatgtcgttgagttccgcgatgtcgcgcgccacatatgcggggtttctgctgagcaacgcgatttcgtcgccatccccgtatgtgaccgctatgcaggagatgccgttggtccgcgcagcttcgatgtcgctgaaggtgtctcccacatagaggcattgtctcggcgcgatgccatgccgtcgaacgatttcggccatcatttcgaccttcgtcgcctcacggccgggtatggaatcggggcagatccaatcgtcgaacaggttcgcccagcctttgctgccgagtatgcggctcaatgcgccctccggcttgttggtgacgatgatattgcgtacgccatgttccttcagctcattcagcatgctctgaatgcccggatagagtctggtgcgcgaaaaatcattgagcgtgcggtagtgtacgcgtacatcctcatcaaatgtctccagatacgcctccccgggataggggatcacgtgccgcatgatctcatccatcggatcggctagattggcgtcatcgcgcatgtacaggtcatcgatcgccccgcccgcacgacgcgcggcgtacgtcagggaattccacacgtcgctgccggtgtcggcaagggtgccatcaaaatcccataacagacatcggtattccattggcctgctcctttcgttcattcgcatggcggcggtcgatgatcgagggtgagataccgccggccggccagaaggggttggaaccgccggccggcggtggagggggttgttcaggggcaagactcagtcgtagttttcgagggtgctgttcagcaaatcaacgaatccggggaagtcgagttccagcgcagcttccgcattcggctcttcgccgcggtaacccatcgtcggagtgcgctcaagatccacggcaggcacggtgccgcgcagatgacggtagtcgcacacggtcatgccgcgggtgagtgtgccgtgcagctcgatatcgatatgcatcgggaccgcagtgatcagcgacgggtcgataacccatgccaccgcgcatgcgtcgtgcatggtggcgcccgtcagctcggactcctcctcgcatgcgccgataaagaaatcggtcaggtcggcggccaggttcgcggccttggtgccgatctcacggaacttggctacgtgcttggcggtcagctcgcattgacgggtcaggttgatgccagtcatcttgacgtgcatgccggagttgaacacgcgcgacgctgcctcggggtcgacgaagatattgaattcggcggcaggggtccagttgccgtaggtgacggacccgcccatgatgcacagttccttgacccgctccacgatgcgcggctcacggttgatggcggaggcgatgttggtcagcggaccggtggcgatcagcgtcacgtcatccgtgctcattacggtgtcgacgatgaagtcgaccgcatgcttgttctgtgcggcgtgcgtcggttccggcagcacgggaccgtccagaccagtctcaccgtggaactgcggtgcggtgaccagcggtgcgaccatcgggcagctgtgccccggatatacaccaatgcggtccgccgcgccaaggacctcaagcaccttgatggcgttgcgggtcacgttctccagtgtgcagttgccgccaatggtcgtgatacccagcacgtcgaggtgctgcacggcgagcatgatgccgaacgcgtcatcgtgtccgggatcgcagtcaaggatgaccttcttcttgttttccatagggatacctccgttggttgtgttctttggattggtcgatattcgggtatggcgttcagccggtttgcccgacgaggaactcgtgcagctgcgcggcgtccggcgaggaacgcgccccgcggcgggccactttgtacgcggagacggcattgccctctcgcaatgattcggcgagggaggctccggcgagtctggcagcgatgaaaccggcgttatagacgtctcccgctccgatggtgtcttcgacgttcacccggaacgccgggctttccgtcaggccgtcttgcgtaagaccgatcgatcctcgggcgctgtcccggacgatgacggtccggccgcccaccgcataggtcgtggcattgcccatcatgtcgtcgtcgcctaaataggcgaactcatccggccccgatccaagcagataatcgacattcggaataatgcgttcgagtgcagccgcgaaatcggggtcgagcacgccgtcatccacacgaaggttcaggtcgaaggatgtgggaacaccggcatcgtgggcctgttcgaagatgcggatgatcgtctccctggcactggtgtcgtaggtcaggcacatgcccgaggagtggacccaatccgcctcgcgaatcatgtgcatcggcacgaggttttcgtcgagtaccttgaacgattgccgttcgcggggccatccccacaagtacctctctccgcggtcgtccacgaaagcgaatacaccgaccgtgttcagggtcgaatccgcaaccagcccggtcacgtccacgcccgcatccttgaagtcctgcatgacgaaacgcccgtactggtcatctcccacggtgcccacgaacgatacatccagaccaagctttgccaacgccacggccgtgttcgccgaggttcctcctccctggatgccgatctgcggatattcgacctgcgtgcgctcctcgttgagaaaacgcgggtatggcacgatgacatccacgttggcatcgccgacgacaacgaccttaggcatctttggccgccttgataaaagcctcgacctttgccgggtccttgcaccgatccgtatcggcgcgatcatcgtcgtaattggtcagggagaacgagtcgacgccatacggatgcgtggcgtagatcgcctcggccacattggaggcgtccagaccgccggcgatgatgcacggcacgtcggtggcttcgatgatggcccggtcgatggcccggtcatgggtcaggccggtcgctccgatgtctccggcagcaggtgatttagtgtcgatgaggaagaagtcggaaaccggctcatagtccttcacatactgcatgaccttctgttctccgagaggcactccggccagcaccgggatggcctgcatgatcttcagttcggggaaccggctcttaagttccgccacttcggccggactgatgccttcgatgtcaccagacaggtgcagcacatcgggcatggcttctcgcaggttctcgctgatttcgtcgatgtcttcggcgacggtcaggcctatgcgcacggcctgtggttgcacgccttcgaagatttccctggcccgttcgcaatcgagctgaccgggcgtccgcttgattttgccgtaggagacgccgatatgttcgccgcccatgtcgattaccatgcgagcgtcctcgacattccttattccatagatttgagcaatgacatcagccacgatggttcctttcctgagcaatggcgttgatgaacgcggggacggataacaccgtctccttgaggcctgcaccctgagccactcgggtgacgggcggcggcgtcacgaaggaacgccgaagtgtgtcggtctgggcaaacacctcgcaggcctggccatcgagcagcacgcggccgtggtacatcacgatgacacgggagaagttcgcggtgacgaatttcatgtcgtgcgaaatcgtgatgcagagtttgccttgtgctttcagacgttcgatgatgcgtgcaaggcagacgttgcccgacgcatcctggccgcacgttggctcgtcgaagatcaccacggatgggtccatcatgatgacggcaccgattgtgcagaatttcttctcggtgggcgtcaggtcgaatgggtgcacgtcgagctttttggtgaggcctaccagctcggcgatgctgtccacgcgatgcgcgatgtcctgatcgctcatgccgatctggcgcggaccgaattcgaattccttgcggacgctttccagaaacagctgatcgtcgggattctgaaagacatagcccacgctgcgggaccattcggcggtgctgcgctcattgacgtcaatgccatcgatcagcactttgcctccggtggggcgcagaatgccgttgaaatgcttgaccagcgtggtcttccctgcaccgttctgccctatgatcgccaccggctcgttgccgtcaagcatcaagtccactccgtcaagggccttgtcccctccgggataggcgtgctccagtgcctgcaactcgattttcatgagagcgcctccttggccatgcggatggccggctcctcggtaatggcaatcgggccaccgagcgcacgggtgatcttcacgtaatcgggcacttccacgccatgctcttcaatcgccggatcggagaacacctccatcggagagccaagggccacgacttcgcctcgctcgagcaccatgacggtatccgcgtatcgtgccactcgctccatgtcatggtcgaccatgatgacggtgacgccgtccgcattgagctgtttgacgatgtcgaaaatctcctcgctgcccatagggtcgagctgcgtggtgcactcgtcaagcaccaaaatgcgcggttccatgatgaaagtggatccgaaagccacacgctgcacctgtccacccgacagttccagtgggttcttgtctaggatgtggtcgatgcgcatcaatttcgccacagcttcgacgcggtcgatcatctgcgctctggacacaccgtggttgcctaatccgtaggccagctcttcggcgacggtcccggcggtgtaggacagctggttgaacgggttctgaaacaccaggccgatggtcttcgacagttcggcgatggtcgaatcggcgacatcggtcccgtcaattaggatgcgtccagccctcgcccccacgaaatagtgcgggatcaggccgacgagcgcgttgcataacgtggatttgcctgccccattcgcgccgatgatggtgaagaagctgccttcctcgacctggaagtccacgtgtttgacggcccgacgcttgatgtcgcggtacttgaaggagaaatccttgacctctactatcggactcattcacttgcctccccacgagaccggcgacggaatcacaccgatgcggatgcatacggaaacggcgaccacggcgatcagaaataggacgaaaatccaattgagtaccttgtcggtggcattccagctgaccttgacataactggtctgcttcactccagtaatgccgaagccgcgggtctccaaggtcataccccgctcctgggcgtcggtcagcgatgacatgacaaccggaccaagcaacgggatatacgccttgatgcgggcgatgaccccacccgatgcatcgagtccgcgagcggattgcgcctcctgaatcaccgccatacgtcgttgcatctgcggcacgacattcaggctggcgagcaccaggtatccggccttggcgctgagccccaccgaagtgagcgcggataccatagcaccgacataggtggttttgttcatgatgtagaagctgccaagaaacaccagcaggctcaccaccactttggccgcatacagcacgccttcgagccccagttgcgcgaagccaaaatccagtaatgcggtacgattcttggggctgtacagcccttggatgaacatgagcatcacagtgacggggatgccgaaaccgaacattatcttggcgaaatcacgctgtatatgagccaagaacgagaccacaaacagcaacaccacgagtatcagaccaagcgtgaagtcaggccatgccaatgcggacagacccaaggcgaatacggccgctatcttggtgatcggattcagcttctcaattacggtgtcattgatgaccggcatatgcgacgacatgtcttactcgtcttcttcttcgtcatcatcactcagcgcatcattgtccgagccgcccatggagtcggccgcatactggctgagaaagcgacggggaatcttctgcacgatcacccacgcgatggcgacagtgatgcccttgtcgatgaggttctcgatcagcgacgaggagatcaccgaggcgagaatgtctttcatggccacgaccagcgttgccgttagcaccgatgtaccgttgacgccggtggcaccgccgtatacgaatgcggtgatcagcgatgcggagatcgcattgacgagcgtgcacaccagccagatgaccacgacgccccacttcttacggaacagtccggccttgaccatatagccgacgaccaaaccgcacaataccgacaccgccgcatagggaagatagaccgggttggccaccagtgccaggaaaagattggtcagcaggccggtcagggccgcgacccatggtccagacaggcatgcgacgacgatggtgccgatcatgtcgaggaacagcggcaacttgagtgcggagcacagagttccgccaatgagattgattccaaccgcgatcggaatcaacactagggactttgtggagaattgcgccttaatcccttcccagaacgacagcttctttgccatgctggccctcctttattttccaaccctcagttttccgcattgtgcaatctgcattgtttgccttgcggaatcttaggaaattattttcctaaaatgttttcttgagataagattataggacgccaacgtcagtgtcaacacggcgggtcgagggtcgcgcaacctggaccgaacggcccacaatggcgacgtagcaaggaacagaatgctacgcccttgtacactgatacagaggaaaacaggcaggaggggagacatgaacatcagggacatcgcacgcatcgcgggcgtctccacctcgacggtctccaaaatcgtcaacggcaaggattccagcatcagcgaggaaacccgcaagaaggtcctgacgatcgtcaaggaataccattacaagccatatgcctccgccgcgaagcgcacgcgcagctacaccatcggagtattgctgcgctcccccatctctttcgatagcacgctggatggcatcatccaggctgcccagaacgccggatatgcgaccgatgcctacaacagctactccgatccggaacgtgagctcaaaaacatcgcggcaatatgcgggcgcaacgtcgacggcgtcatctgggagccggccaccccggacagtctcgcctatgcctcgcaattccccgaaggcaccccgttgctgaccataggacccaacggcggagaccagtcactgctgctgccttataaagaggcggcctataaattgaccaacgagctcatcgaacgaggtcaccaacacatcgcctgcctaatgaccagaggccgccgcacacaggattttttcgaaggcttccgctcatgcctgttcgatcaccagctgccatatagcgacgacttggtctactacgacctcaacgattcactgcccagcaaaatcggaagccgtgacatcaccggatttgtctcctcgcattacaggcgagcactcgagttcacgcagatgatccgccccttgcattaccggctaccggaggacgcctcgctcgtctccatcaaaaacgacaccaccgaggcactggcttatcccggcaatgcggaaatatccacctacaccatccgcaactccgacttcggcgcctacctctgtgagaagctcattgcacagatagagcacgacaaagagcagcatccctcgttcgtacaggattttcatctcgacaacaccagcacggtcgccgctccgcctacttccgccgtcaagcacgtgttggtcgtcggcagcatcaatatcgaccactatctgtcgatgccgcggctacctcacatcggaggcacggtatccaccaaatcggcggcacgctaccccgggggcaaaggggtcaatcaggcaatcggcgcggccaagctcggacatcacgtcaccctcatcggcaatgtcggcgtcgacaatgggtccgattacattttcaaggcgatggagcagcatggggtcaatacggccggcgtgcgacgctgcgccggagaagacaccggttcgtcgttcatattcctcgaccccaacggcgaatcgattatcgcgattctctccggagccaacgcatcgcttaccccggatgacatcacctccaacgaacgactgttcgacaacgccggatactgcctgatacagactgaaataccgttggaatcggccaaagtcgccgcgatcaccgcccgacggcaccatgccaaaaccattatcaagccctcgtcatgtgactatctgcccgactccatcgtcgccaacgccgacattctcgtgccgaacgagcacgaactggcaatcatcgaaactgagggaaaaacgatggaggataaggccgcgcatcttctcgaacgcggcgcgggctgcgtcatcgtcacccaaggagaatacggctgctacctgcgcggccagaatgtcgagtgtcactatccggccgctgacttcacccccgtagacagcaccggggccggcgacgcgttcatcagcgcgttcgcctcgtatctgatgtatggatacaccgtgcggcaggcggtcgaaatcgccacctatgccgccggatactcgatcacccgcaaaggcgtcattccctcgcttatcgaccggctctcgctggatgcctacgttcaccacagcgagcgacagcagcacggtcatctgtcttaaagcagttttcaccgcagacgattgaggggagccgtatctagtctgcggctcccctcagtcagcttcgctgatagctcccctcagagaggggagccaaaaaagcactactccaactccaccgcgccggtgtacagctggtagtactcgcccttctgcgcgatcagctcatcatgcgagccgcgctcgatgatgttaccgtggtcgagcaccatgatcacgtcggagttgcgcacggtggacaggcggtgggcgatgacgaagaccgtacggcccttcatcaggttatccataccagcttgcacaacctcttcagtgcgcgtatcaatcgaggacgtggcctcgtcaaggatcagcgcgggcggatcggccaccgccgcacgggcaatggaaatcagctggcgctggccttgggacaggccggaaccgtcgccttccagcactgtgtcgtagcccttgggcagcatgcgaatgaagctgtccgcattgaccaaacgagcagcctcgatacattcctcatcagtggcgttcaggcgtccgtaacggatgttgtccatcacggtaccggtgaacaggttcacgtcctgcaacacaatgcccaaagacctgcgcagatcaggcttcttgatgccggacacggagatgccgtcgtatagaatctggccttcctgaatgtcgtagaaccggttgatcaggttggtcacggtggtcttgccggcaccggtggcgccgacgagcgcgattttctgaccgggtttggcgaaccaggtgatgtcgtgcagcaccggcttatccgggttgtagccgaaggtcacgttggtgaagcgcacatcgccgcgcagcagggtcagtcgaccatcaggcgaggtaatcgcctgttccttggccttcatcgcaacctcacgggccgaacccttgagcttttctgcggccttcagcgaacgcgtgccatcatcgccggcctcgcgcttccatgcccagtggccggtctcatggtcgacctcggtcatggtgcggccgtcctcgccaagttccacattgacgagcgtcacggtgcccttgtcttcctcgatgggctcatccatcagcttgaagatacgggaagcaccggcgagcgccatcatcaccatggtcagctgctgagaaacctgaccgatcgggttgatgaacgaacgggacagggtcagcaaggagacgagcgtaccgagggtgagcggcttgacaccagtcagaccgatgtcgttgacgccggccaacgagacggcggctccgacgatggcgagcaggatgtacagcaggtagcccatgttgccgacgaccggcatggtgacgttgccccaagtgttcgcttcggcggacgcctcaaagagttcctcgttcttctcatcgaaggtcttctgagtggcgtcctcatggttgaagaccttgatgaccttctgaccattgacggactcctccacgaaggcgttcacgtcgccgatccactgctgctgcttgacgaagtagcggccggaacggctcacgatcttgcgcacgatgaagtacagcagaacggtgaacgcaatcacgaacgcggtgaacgggatggacagccacagcatggacagcagcgccgcggccgcggagataatcgaggagaacatctgcgggaacgactgcgaaatcgcctgacgcagcgtatcggtgtcgttggtgtagtggctcatgatgtcaccgtgctcatggctgtcgaagtagcgaatcggcagcttctgctggtgggcgaacatgtcgtcacggatcttcttgagcgtgccctgttcgacggtgatgatcagccactgccacagccaggatgccacgatacccgccacatacaggcagcccatcaaagtgatggcgcgtagcagcggcgcccagtcggggttcgattcccccaccatcggcaggatgtaggtgtcaatcagcgattggagaaacagcgcggatccggcctgtgcggcggcgccgatcagaatgcacaccacgatggcgatgacgcgccacttgtactggaagatgtagctgaagatacgcttgatggttccggggtcggctttgcccatgtcaggcttgcgattcttggaactctggtcgttgctcatcgtgcttctccttccttgatatcggctgcattggtatcagctgcgctggtatcggccgtgggcatagtcactgtcaccgtcacggtttcggacggctcagcggcagatggctcagcagcctgttcggcatcggttagttcttcaggctgggcctggttcttggtctgggattcgtagatggaacggtattcgtcacaagtggcgagcagttcctcgtgcgtgccggaggccatgatacggccggaatccatcaccagaatcatgtcggattcctgcacggaggccacgcgctgggcgatgatgatcttcgtggtgtccggaatctcgttgtggaatgcggcgcggatcagcttgtccgtcttggtatcgacggcgctggtcgaatcgtcgagaatcagaatcttcggcttcttcagcagtgcgcgggcgatgcacaggcgctggcgctgtccgccggacacattggtaccgccctgctcgatgtacgtgtcgtacttatcggggaattcctgaacgaatccatcggcctgcgcgagctgcgcggcatggcgaatctcttcatcggtggcgttcgggttgccccagcgcaggttttcggcaatagtgccggagaacagcacgttcttctgcaacaccatggccacctgatcgcgcagcgcctcaatgtcatagtcgcgcacgtccacgccgccgaccttgagcgaaccagagctcacgtcgtagagtcgcggcaccagctgtaccagagacgactttgccgaaccagtaccgccgacgatgccgatggtcatgccggagcgaatcttcaggttgatatcgtccaacacgggcttttcggaactgtcggagtagcggaaactgacgtggtcgaactcgatggagccatcggccatatcggtcaccggctgagccgggttctgcaccgtgctttcctcctgcagcacctggcagatacgctcggcagaagcctgagaaataatcaccatgacgaaaatcatggacaacatcatcatggccataagaatctgcatagcataagtgaccagcgaagtcagctcgccggtggacagacccagcgccgcattattgccggaagcgacgatctgctgcgcgcccatccatgcgatgagaatcatcgaggcgtagacgcacaccatcatgatcggcatgttgaagctcatgatgcgctcagccttggtgaagtccttgaagatgcgctgggagatgcggccgaacttggagacctcgaaggattcgcggttataggacttgaccacgcggatgccctgcaggttctcgtcgaccacgttgttcaacgcatcgtaggtgtgaaacacgcgctcgaacacggggtgcacgagcacgaccagaccgcacaggccgatggccagaatcgggatgcaggccaggaacaccatggaaatcgacggggagatacggaacgagaacagccaggccacgaccaccatgatcggggcacgcacacccagacgaatgatcatcatgtaggcgttctgcaggttcgtcacgtcggtggtcagtcgggtcacgatcgaaccggtggagaaccggtcgatgttggtgaagctgaagccctgcaccttctcgaactggtccttgcgcaggttcttggcgaagcccgcgccggccacggccgcgtactttccggacaggaagccggcacccagcgaaaccatcgcgcaaatcagcagaatcacgccgaatttgacggtggccggcatgctgccgccggtgataccctcatcgatcagcgaagccatgatggtcggaatcaggatttccagaataccttcgaccgccacgaacaccggagccaggatgctggctttcttgtattcgcgaatcgactgccccaatgtgcgcagcacatgcttgggtttatccggttcgacggctttgcgcgcctgcgcgattgcctctgcggtatcgctcattcgttctcctccttcgtgttagcaacctccgctccgtcttggtcgggagccatcaccccaggtgactgagggagtgtttgatgctcaaattcatgttgtgcgcggtcgatgttcgcgcgcatgcgactgacgtagtcacgtagggctgctttctcgctttcggaaaagccatcaaccaacagacgttcgacgcgttcgccgttcgctttgagatcggcgacgatggcgtccgccttatcggtcaggacgatacgcttgcaacgggcatcatgcgccaccgattcgcgggcaataagccctttcttttccataagcgccagcacgcgcgaagcggtggagcgggtgatacagaacttctgttcgatagtgtgctggtagatttcacgattccggttacgagccaggaacatgatgatatgcgcgttgccgccagtggtctccttagcggaaagcggcatgctctcaccgagatagcggtcgacggctttggtcaccgcacgcatctcaatgctgagaatatgctgatccattgtcctccgtaccatgcgaggccgtgcgcgtatgcgccttcaccccacattgttgtatacgcaacaattcatgataaagagacccatatacaacagttgcatatacaacaatcagcgtgttgcctagacaacgaacccccacatatgccctatacacaaactggctcccttctctgaatctcagaaaagggagctggcagtttgcgtagtattacttgctcagcttggcgtactcgtcaaccatgaactgggcgatcttcttgccgccttcgcccagcagggtgggcagcgagttgatgggcatggagttgaggaacatgcgcatcatcgcattatccggaagcttcggcagctcgccggcctcgccggcggcggccacgatcttggcgccgaacggatcgacctcccactcgccgtaggtggaccattcggtgagcggctgggtcttgccgtcgccatcgagggccacggcaacggtgtcggcaatgtcgcgggagctcacgcccacttcgatggcatattcgccggcctccacgtgccagtcgttgtacttttcggaccagtaggcgaacgcgcgctcgtcgaggtcgatggtcacggtcttggatccgccggccttgaggaacaccttggtgaagcccttgagctcgtgcttcgggcgggccacgtcggccttgcccggagccacatacacctgcacggtttcggcggcgtccacatcggaggtgttggtcacggtggcggtcacggtggcggtgttcgcgccggtcttgacggcggtgacgtcggcgatctcgaacgtggcgtagctcaggccgtagccgaacggatagtccacagccttgccgtaggtgtcgtagtagcggtagccgacgaatacgccctcgccgtagtcgacgtggccctcctcgcccggccagttcgtcatgctcgggtcatcgttgatgtccagcggaatggactgggcgagcttgccggacgggctgacctggccgaagatcacatcggcgagcgccgggccaccggactggccgagcagccaggattcgaggatgcccttggcgttcttggcccacggggccacggagaccacggaaccgttggacagtacgaccacgacgttctggttcgcggcggcgacctgttcgagcagggcgatctgcttggcgggcatgtcgagggtgtcgcggtcgaagccctcggattccgcggcttccggcaggcccaggaacatgaggacaacgtcggcgttcttggcggtttccacggcttcggattcgagggccgggtcggccggttccatatcgagcgtgaagccgggggcgaagtcggccttgatgccgcgctcggcgagcgtgtcgaggaagctggtcatcttggtgggggtgatgtgggaggagccgcagcatgggcttgcgccaatgcatactcctttgtcttcgttatattcacggctccccctttgccgaaaaataagggagggacatctgagccagatgtccctcctgagatgaaaagccatgttttacagtcttctgcatgactatcatccactactttcgaagtggaatcggtagtggcttcggttgacccaaccgtatcacccagccactgggctaggcaccctgctttcgcggtattcgtccgcgcggacgaatcaagtgccagcggcagctgacttctcatctcgaacccgcaacccaccccgccgcaaaggataggccgggtcacgaagctcattctctaccttacacaattggctcgaatcatgccaccagagagcaatttcgttctcattacaccatccaaccagcgtgccagacgtgagtgaaatcccaagggtcgaggcgtgacgtgtcggattgtgggtcgatggtaggcaagaaatcacgattaccacgtaattggtagctccaataaatctgcccggcggatgcgctccacgctttgcgctgtatggcggcaacctcgcggtaaatagagcctctgattgatgcactgtgcatagcgttttcctcggagcgaccgccatcacccgaatgcttagcgatcatccgatttaccagattgttggccacgcaccactcccctacgatcaccggcgtatagcgcgcggcccggcggatgcggcgttcgttccagcgcacgaacaagcgataccagcccatcagccaccgatccggaatcatacggaatagcggaaaatgttcggccatgaccagatagatatgcgtatcgagcatgacgccccgcatgccctcccgcacaaaccagtcccgccaacggcccagtcggaagccgtcatggaacacaatgacttggttctcggccaaaatcgggcgcaaccggcgatacgactcacggtagaaacgcttgaggaacaccattggaatcggcccactcctccgtgcttcaaagctatcctttgcctgcctgctcgatgacgacgtagcatacgtcagccaatcaatcggctcattcagcacttcgatgccgaacagcgccgcacgatcacggtaccgtttggccaaacgagtcagcacatccagcgcataggcgaccgctcgcgggctatgatgccagcgcaccacgccggtgaggccgccgttgtcgaatccgttctgcgagccgggcaccgtgtgcaggtcgataagaatcttgagaccggtacgctcagcccagtcgaacgccctgtccaaatactcgatgcagcccggatgaccggacacatccccgaagataaaatacggcacaggaatacgcaccagattgcagccatgcgcggcaatgttccgaaaatcagcttcagtgatatacgtgtcgcgatgccgcgtcagcagagcctccaactcagcagactccgtagcccgatgcagccagatctcgtccgcttcgccgctggcggcaaaaatccccggcttcatccacttttccagcaccagccagttaccgaggttcaccccattgatctgctcgccaatgcccagtgtgcccagtgccattaatgtcacccgcgctaatcgttcaatgcttcgccgtaacgaacgaccaacccctgattcacacgctcaaattcggggatgtaatcaacgatgatggcatccacaagacgccgggcgcgttcctcatcgtagatatgagcagaatcattgcgatcgcgcagcatacgcagccacaacgattcgtccatgaaatcgtaatattggaaagcggttttgagcacatctcgcggagaaccggaagcggaaacagggtctccctcataagccagcagcgccttgaatagtttccaaccaagctcaaactgcaactcgaacttgtcaatgatgccgctctggatgaaatcattgctgagatcctgttcgggagccttgcgcagcgacttcagtgcggaaacgtaattctcatattttttcatacaatacctttccgctacgctcaatctccgccctcagcgatgaagaaatcggctcatccagattgatgacatcaactttaagcagtgaccacagattgtcctgaaggttctgctccaagcgattgaaatcggggcaaccggccacggcaagatcgatatcgcttttaggccggttcacaccctttgcgcgagaaccgaacagcacgaccttgcgagcgccggcatcagcggcgaacgtacgaatctgttcgtacacgttctcgataggaaccatgacgcctcccgccgtatgcagaaaaacccggaccacccgcgcttctatcatacggccgcggcccgctcaccgcacggagcccgaaccacccgaacgcggcgacgcagttgcaggaggcgggctggcgctgtagggtgtgcgggtaattcctgacgcctatttttcaggaggtgaatctcatgttcaccacgttttctctggccgtcattctcgactgcaccgtacgcatcgtgcttggcacggcattgggcgcactgatagggctcgaacgccagttgcgcgcccgaagcgccggcatccgcaccaacgcgctggtggcattgggatccaccctgttcgtgctggccaacccgccgttccgcgccatcggctcgttcatcgatcgtcgccgcagtatcaacgattatgagacggtcggccatgaatacacgtttgaagtgcgctgggatgtggagcacatcaccccgtccgactgacgccggccggcggcgacgcaacagcgcaacaagccgaaaagcgggatgcgacatcgaaccgcatcccgctttgccattaccgagccgttgtctgactcatctacgccacggtgaacgtggtgcgcttcaaatcctcacggcgcgaggagtggccaatgagcagttcgaattcgccggcctcgacgatgcggttggcgtccgggtccacgatggtgcagttcgccaccgggatctcgaaggtgacggtcttggcttcgccgggttccagttcaacacgcttgaacgccttcaattcgcggtcggtccagctgtaggaggtcacgatgtcgccgatgtaggcctgcacgatctccacgccggcgcgctcgccggtgttggtgagggtgatttcaacgtgtacggtgtcggtttcggcaaaggtgccgtcggcattgcttgcgccgcccacgatggtcggttcgccatatgcgaacgtcgtgtagctcaggccttcgccgaacgcgaacgccggatcctgggtgaggtcggcgtaccggtcgccgtgctggccgcggatttggttgtagtagaccggcagctggcccgcgtggcgcgggaaggtgatcggcagtcggcccgacgagttggtcagacccaggatgatttcggcgatggcctggccgccgcgcatgcccgggttcggcgcccacaggatggagccggtgccggtttcagggtcgctgacgcgcttggcgaacacgccatactcccccacgatggaggcgggcagcacctgcggcttggagctgatgagcacggtgaccatcggcttgccggtttcgcgcgagacggcggtgagcgcgtcgagcagggcgttctggccgccgagcagttcgagcgtggcggtggagcaggtttcgccgaccagctggaccacgtcgccgaccacggccacgatcagatcggactggcgagcgttggccacggcctcgtcgatcagggcctgatccacggcggcggaaacgccgattttcgggcgaggctggccgtccgggtagaactcgcctgcggggtcaggcacgaggtcgatgacgttcgcgccgcgcgagtagaccacttcgcaatcgtcggcggtgagctgggtcaggccgtcgagcacggtggtaatcatgtctcgaggctggccatccggcatccaggaaacctgaccggagttgccggtccagtcgccgagctggttctgggcgtcgtcggcgagcggacctaccacggcgatgcgcttggccgtgttcgcggtgaacggcagggtgccgtcgttgcgcagcagggcgacggattcgcgggcgagttccaggttgatttgctggtgttcggccgaaccgatgaccgccttgatgcgttcggcgtccggcagacgcgggtcttcgaacaagccgaggcggaatttcagagctaggatgcgagctactgcgtcatcaatcagggattcgtcgagcagaccggtttttacggcttcgatggcaccctcgtagaactgcggggtggtcatgaccaggtcgttgccggccttgaccgcgtctgccgcggcgtgcacgtaatcgggtttgacgtgctgctcccataccgaacggccgacgttgtcccaatcggtgatcagcgtgccgttgtacttccatgcgccgcgcagcttgtcggtcagcaaccatttgttgaatgtgaccggcacgccttcaatggactcgtaacccagcatgaacgtaccgcaaccttctttggccacgcgctcgaacggcggcaggaaccaggattcgagcttgcggtgggagaggtccgcttcggaggcgtcgcggccgccttgggtttcggaatagccggcgaaatgtttggcgcaggccaggattgcgttctttggcagttcctcaccggccttggcaccgccttgatagcccttgaccatggcggaggcgagttcgccgatcagcatcgggtcttcgccgaaagtctcatccacacgcccccaacgggtatctcgggcgatgcacaacacaggagaaaacgtccaatgtacaccggtacaagagacctcctcggcggtagcacggccggcggccttgaccttgtccggatcccagctgacagccatgccgagctgggacgggaaaatagtggcgcccggccagaaggagtatccatggatgcagtcatctccgataatcaacggaatgcccagacgcgtcttctcattgacggtcttggcggcacgagataaatcctcggggctggtatgcagaatggatccgacatgcttattcacgatgagatcctcaagatcgccgccgcgggcgtcaagctgcatcatctggccgaccttctcttcaagggtcatgcgagagagcaagtcggagattcgctcaccagcgggcaaatcaggattcttgtacggtaaggtttcagcagttgcggcaggcgtagtgttgtcggtcatacgaagtcgctttcctcagtgaaatcgaacagttttttaattaccaattggtagtttatctattgacagcatacaacacgcttatgccgcgcgcatcacatacaccaaaacgaccgtatgtatgcgaccccttcgttcgcccgcatacttactgccgccatcaagcacaagcatcggttcaaggcacacagcgaatcagcgatacccgtcccatatcggcgaaggaaatatcgccggctccagatcggcccattcatcgcataagtcaatggccggcccccgtaaccacctcagttgcacaccatccatgatctccagagcatggcgcaacgtgggccggacctcctcaaacgaggtgaattcggaaggcaggttccagttgtatgtcgaatagtattgccatattgaatcccgacgattggcaaactcgtcatgtaacggatgcgcaggattgaacgattcgacctgcaatatcgagaacagctgaacaagcatggggcgcgtggaattgcaatgtaccaagaacctcagatacgcgggcaatctgaaatcatcgggcactgaaccaggcaggccggaggccatgaagtcttccacactgccaaacgtgttgtaattctcgtgatacaccgcggcaagcaggttatctttgctaggaaaatatcgcaaaactccctgcttggtaacaccgaccgcatcggccacatcctgcacagaagtaccgttgtagccacgctcggaaatcagtcgcacggcggcatcgagaatttcctgccggcgttcccccggcgacttgcgaacacgcttatgctgcaatgaattcccagatgtcatatccgccagtctatccgcattctccccgctcccatgcgcaaccacatccaatatccttggccggatatgcaaaacggtgccaaaacaaacattctgtcatgccttcgacaccgatatcgcgcaatagatttttctgtatatgcttcttcgcttactcctggaacacgtcggggtgcttcagatcgccgggaatgtcggacaagaggccctccaatcccaagaattccttccagaaatcgagcggctggccgtatggcgaagcctcgcgaccgtgggcctgaatgttggccttggcctcgaacacctcttcctcgctgatgccctcgaagtagctttccagacgttcacggtgctcaggcacgtagaacagagaggacacaatctccgtcagacgctcggcacgctcaatcggcagtgaatcccagtgacgcagttcgatgaagttcttcagacgtacgtcattgaagtgcgtggagatgatgtggttgatctcgtacgggttgagttcgcggtctgggtacacctcccccgcgttctcacggaacgccgggcgatgcagttccttggggcttgctccagaagccacagcttcaggggtatgggtcaggtcagcgaacataagcggcgtggacagcacgtcgatggcgtaatcctcccaaccatagcgatcatcgaacaggccgggcagcacattggtgcgctggaagtccagataatcccacatacgctggcgcagcagcggccatgggttcgtctcgccctcaaaatacggggtgttacggaagaagtaggccagaatcggaccgatgaccgtgcccagacgcaacttttcgatggagtcgcgctcatccacataatcaatgctgacctgagtggaggcggagcaacgcatcatgcaggggccaaactgacccacgcggccgaggtagtcggtcattgcatcgtagcgatccttggggttgaccggcacatccgcaaagctggatttgggctggtaaccatagttgaccaagcggaagtcgagatcgtcaagaatcgggtcgagctcgcgacggaacttggagtacagcgtatttaggccgctcggcttcttcaaaatgccgattgaggtttccacctgtccgccgggctcgagagaaacggcgacgccggaacggccgagacccaccagatggccgttctcccagtattccttctcctcgtcgtagtacggagccaagcgtttgagcaatgcctcgatgccattcggctcgtagtagcttacggcagtgtcgtcgctgttgtgcacgggcaggtgctcgatctccacaccgaagccaccggtgccacgctgggagcgaccgttctcaaagaacttgagcaggctctcgacatgcttggggttcggcttggcgagtaggtgcgcgtaactgattcggggagtaaccatgctttgtatcgtattcgagccggccggcgcgcgtgcccgaaagcccgcaatacgctatacgaaaaaccgatagcaggctccggcccggtttctcgctctagagactccccctcagtcgctgcgcgacagctcccctcatagaggggagcttaagtgtatgtgcgttcagtccgcggaggtgaagccctgcggctcgccggtctcggcgaacttggcgttgtgggccttcttggcagcggcaatcatcagcttgatacggttgagctgattggcctcggaggcacccggatcgtaatcgatggagacgatgttggcttccggatgcagacgacgaatcttgccgaacatgccacggccggtcacatggttgggtaggcaggcaaacggctgcgcacaaatcacattcgggcaaccctgttcgataagctccagaatctcagcagtcagcagccagccctcgccggcctgtacaccgatggaggtgacttcagcagccttcttgacaagatcgggcatcggctcgtcctgcttgaacttgccgtgcgaggtggccaatgcggccttgataggcgcgttgtacaggtcaagacccttgcgcatcaaggcgtagagcgtcttgttgccacccatgccgaggttcttctcgttccagtcggtgatgtaggggcgggtggtcatgaattccatgatgccgggcactacggcctcgcaatcctgggattcgatgacgtcgaccacatggttgttcgcgtccggctggtacttgacaagaatctcgccgaccacgccgacacgcaccttgcgcggaatatcacgcagcggcaatgcatcaaaggatttcacgatctccttggccagcacgttatacggcagatagcccttcttgatgctcggcgtcttggccgcggtcttggaatagccgtgatgctcgatggtctcacgcacgatggtgtcccacagctcgtacagcttgttggccgaacctttctccacctcatacgggcgtacccggtagaggcacttcatgagcaagtcgcccagaatcagcgccttgatggcacggtgcagcaggggcggggtggccttgaagccggggttgtcttcgaggccctgggtagaaatggcgatgaccggaatctgcggatagccggcatcgaccaaagccttgcggatcaggccgaagtagttggtcgcacggcacatgccgccggtctgggtgatggcgagcgctacatggtcgggatcgtatttgccttccagaatcgcgtcgatgagctggccgacgaccatgatggccgggtagcaggcgtcattgttcacgtatttgaggccggtttccacatcgccacggctcgcgtgcttcaggatgtcgaacttgtacccaccggaacgaatcaccgcttcgaccaaggacatatgaatcgggctcatctgagggccaacaatcgtatagttcttcttcatgtccttgacgaacttctcacgatgcgcgtatcgggacatggtggcgttgttgtggccggacttcttggcattcttggcgttcgccacgccggtggtgccgtccgaagtgccattcttgtgggcgactgcggcctgtaggtcgcgttcggcggcacgcttggaagcctcacgcatcgacttggtgagattcgggttggcggccatggtcgtatcaagcagaatctgacggcctggagtcggcgcggtggaaccggtcctgcggaagccggtgggcttgggaccctgtacggacgcagactgtgcagattgtgccgtcttggcggcgtcctgcacagccttggcctcagcgtcgaccttcttctgcgcggcttcaacggcggcctgcgcttcagcaagtacggccttggcggcctccagatcggactcggccttgaccttggcttcttcagcggcacgttcggcggcggcctgctggtcttccaaagccttggccgcagcggcctcgcgggccttgttggcctcgcgttcctcgacggcggccttgagcgagcgcagtcgaatcttggctgcacccaggttggagacctcgtcgatcttcagcagcgtgtacacgtccgccttgtcggccagaatctcggccacctgatcagtggtgatggcgtcgaggccgcaaccgaaggaattgagctgcacaagctcgaggcccggatacgaggccacgaagtgtgcggccgcgtacaggcgggagtggtaggcccactggttggtgacgcgcaacggcatcttggtgaccgtgcggtcgcctacatggcggaatccggcggcgttcttggaacgcgggtcggcttcgccctcggaaaggaattcggtgaggttgagcttctcccccggctgcagttcgcagatggaatcctcggagagcaccaccatgccgagcgagcagatggtttcggggatgccgtggttgatttcggggtcgatgtggtagggacggccggcgagcacgatgcctcggcagttgtgctctttcatataggcaagcgcggtcaaaccttcctgctgcacgtcatgcttgaagaccttgtcttcggcgtaggcggccttgaccgcggtttcggcctcttcgcgggtcacgttggcccacgcaaactcttcgacgatgcggtcaaccatgagctcatggttggcaaggttgaagtacgggtgcatgtaacgcacgtcgtcctcgcgcagctcaggcatgttagcgccgacgacgagcggatagttggccacaaccgggcagttgtaatgattgtccgtgttgggcacgaggttctcctcgtagctcacgcacgggtagaagatggtcttgatgcccttgttgatcagccacttgatatggccgtggaccagcttggccgggtagcagatgttttcggaagcgatggattcgatgccggtctcgaacagttcatgggagctacggccggaaatcatcaccttgaagcccagcgaggtgagcagcgtgaaccagaacgggtagttctcgtacatattgagggcgcgcggaacgccgatctcgccacgagtggccttcttgtcggtcaaacggcggtaggcgaagcaacgcttgtacttgtagtcgtacaggttcggacggtcggaacgcttcttcttggcgtcaccaccgcgttcgcaacggttaccggtcacgaagcgcgaaccatcagagaacgtggtgatggtgagcttgcagtggttctggcacagcttgcacacgtcacgctcggtggtcatgctcatattgtcgagtgcgtcgccggtcaggatggagctggcggtgtgggtcacaccgtccacgacaacgacatggacttcgggcttggccggctcggtcttcttgaaggctgcggccttgggttcggacttgagtgcgggctcagcctcggactgttcctcggacccatcggccttaaccaccacatccaagtggtcggcctcatcctgatagtgcatgcgggcggtcagggcggcgccgaacgcgcccatgaggccggcgatgttcgggcgggtgacctgacgttcggtgagcagctcgaaggcgcgcagcacggcgtcgttgaggaacgtaccgccctggaccaccacagtgtcgccgagttcgccggaatcacgcagcttgatgaccttgtacaaggcgttacgcaccacggagtagcacagccctgcggcgatgtcctcgatggacgcgccttccttctgcgcctgcttgaccgaggagttcatgaacacagtgcaacgcgagccaaggtccaccggatgggtggatgccaaagccttttgcgtgaattcctgaatcgtcagccccatagacatggcgaaggtctgcaggaacgagccgcagccggacgagcaggcttcgttgacggcgatcgagtcgatgacgccgtcggtgatggccagatatttcatgtcctggccgccgatgtcgatgacggcggtgacgccggggctgaccatttcggcaccacgatagtgggccatggtctccaccacgccctcgtccaggtgcaggccggtggtgatgaggccttcgccgtaaccggtggcgcaggagcgtgcgatccatgcgccttcgggcagctcggattggatcttcttgacgatgttgatggcggcggtcagcgggctgccttcgttgttggcgtagctggaccagacgatttcacggtcgtcgttgacgagcgtggccttgatggtggtggaaccggcgtcgatgcccaggaagtgcgggccatgcgcgccttcgagggtgccgatgtggatgtgttccttatggtggcgcttgttgaagtcctcgcggtcggcctcggtgggaaacagcggcggcatggtgggcgtgttggagggcaggttcttcagctcgtccaaacgcttcaggatttcgtcgcaggtgtaggcctcgaaatggtggccctgatcgtcggaatccatgtcggcctgcaatgccgaaccgtaggccacatacaggtgggcgtcggtcggcacgatgaactcgtcgaccttgccttcaagggcacgctggaaggcggcgcgcagttcggacatgaagaacagcgggccgccgaggaagatgacggtaccgtggatcgggcggccagaagccaggccggcgatggtctgcgtggccactgcggtgaagatggaggcggcgagatcaggcttggccgcgccgtcgttgatcagcggctgcagatcggttttggcgaacacgccgcaacgcgaggcgatcggatacaggttctcgtagctcttggccatctcgttgaggcctgcggcgtcggtgtcaagcagcgtggacatctggtcgatgaacgcgccggtgccgcctgcgcacgaaccgttcatacgctgttcaggggtgggtttcaggtaggtgattttggcgtcctcgccgccgagctcgatgatgacgtcggcttgcgggtactccttatcaatcgcctcggtttcggcgatgacctcctgaatgaaaggcacatgcagattgtcagcaagcgctagaccgccggaaccggtgatagacaggcgaatcggttcatcgcctcgacctagttccacgagctttttatggatgtccgcgagcagaccggcaacggtggcacgcacattggcatggtgacgtcggtaatcagaaaatagggtgtctttcagggaatcggactgatcaagcaccacggccttgacggtggtggaaccgatgtccaatcccacacgcaggggcttcgggtgtgaagcgggctttacgctcgcgtcagtgacgatgtcaaccatgtgttcctcttaattccgacttccgggagtgcacgtcacgaggcatcaggaaccgtttcgggacggctggcagataccctgcggacggcttcgcccggctacttcttacggaatattagtctgaccacctacccaacatgacgcgggcagaggtgatttcgctcacgggaagggcgtttcccaacagtttcgacgatattgctgagtgcgagttaatgaaaagctactacgaggcttgctggtcttcgccggcttcgcgatctttcagataaatagaaggaatgtcgcgttcctgatcgtgcagtttggcccagatgatgggcttgccggccgcaagggatttgggcacgtcaaggatgcgttggtttctggaaccgcggaattgcaacaacgagtctttttggtctttgagatagcgaccgtcgacaaggatgtcgataaggtgcagcagttcgagtttgtctggggtttcacccggccgcatgagttcttcccacgtgtagccggtccatgaccagatatctttggtatgaccgaattccttgcgaatgcgctgtgcgagaggtactagcacaggggtgttgaggaacggctcgccaccaagaaacgtaatgccttgcacccatggggctttgagatcttcgatgatcttgtcttcgagtttctgcgtgtactcgtggccggcctggaaatcccagatggaggcgttgaagcaattgacgcagtggaaagggcaaccggaaacatagatggagttgcgcacgccttcgccgtcggtgacgatgaaggtcttgtagtcggcaatcatgcgcttggacatgcgccggccatcccattgaccggctttcggatcattggccaggccattggaaggtacggaggggccgcgtctggtctcgccggccgcgaagtcgtggcgcttgggttcgggcttggctgtcacggccataattccctccttgcggaaaatgcactggctcccgctggcgggagctgtccgtcatcaaacggactgagggtggtcaacactataaggatgaccaccctcagtctccgcttacgcccgacagctcccgccagcgggagcgagtataaaccttacttagcttcctcgaaccactcgcgggtggtgccgtcgtccagggtcacgcggccggtttcgccgctcatgtgcttgacacggtgggcaatctcctcgtgacggccgtgcaccatcgggcgctggaccgggctgccgaggtagccgcaggtacgcttggtgacattgcacttgtccgggttggagttgccgcactccgggcacttgaagccttcctcggtcggctcgaaatcaccctggaagccacacacgaagcagtggtcgatcggggtgttggtacccagataaccgatgccgatgttgtaggcgtaatcccatacggcttcgagggccttcgggttgtcctgcaggcacgggtactcgcagtagttgatgaagccaccggaagcgtagtacgggaagtccttctcgtagttgagcttctccatcggagtgggctgcagccataccgggtagtggaaggagttggtgtagaagtcgtggtcggtcacgccctcgatacggccgaacttctcgcgatccatgcggttgaagcgatcggtcagggactccgccggggtggagtacacggagtagtggtagccttccgacttgctccactgcttgcacagctcgttcatgcgcttgacgatggacagtgcgaattccttgccttccggatcccagccatggtcacggatccagttcttgccgtagaagaccgcagtggtctcggcaagaccgatgtaaccgagcgaaacggtggcgcgctcattcttgaacagagcgtctacgttatcgttggcaccgagacgaccgaaagcaccaaaacggaacagtgtcggagcattgaccggggtggcttccttgcaacgcatgatgcggaactgcagagcctggtgagccacttccatacgctcgtcgaacagcttccagaagcgggccttgtcgccgtgagactcgatggcgatgcgcggcacgttgacggtgaccacaccgaggttcatacgaccgtcttcctcgtccttgccggtctcaggattgatccagccctgcaggaaggaacggcaacccatcggggctttgaaggaaccggtgatcttgacgatgttctcatagaacaccacgtccgggtacatccgcttggtggcggattcgagtgccaactgcttcaagtcgtagttcgggtcgcccggatcggcgttcacgccgtgcttgacggtgaagacgagcttcgggaagatggcggtgtggtgttccttgccgaggccgcggatgcggttgagcagaatggcgcgctggatctcacgggagaaccagtcggtaccgagaccaaagccgacggtgacgaacggggtctggccgttggatacacggttggagttgatctggtattccatggtctgcatggcatcgtagatggccttgcgggtacgaatcttggcgaggatctcgcgctcctgctccagctcgtcaacgtcagtgtggaacggagtgtccatcggcagcggctcgcgggaaccgaagtgcagcttggccggctcgttcttcttggcgctctcgacctgacgatgagcgaattcaaccggcatgccgtcggggatggtctcacgggcttcctcaaggaacttctcgtagtccttcttggcgtaccgagcaaggtgctcgtcggcacggttggcggtctggccaccatactggctggaagccacatccttcatgatctgagtaatctgggtggcggcgatggcgatggacttcggggatgccatcggagcgttgcccagggtgaaaccgttggccagcatgtcccaaaagttcggcagggagcagttggactgggcggtgaacggcgagtagtcggcatcgtggaagtggatgtcgcccttcatgtgggcgttggacacggccggcggcagcatgttgaacgctgcggccttggacacggcaccagccagcaaatcacgctgggtggagtagacgttggaatccttgttggcgttctcgtggattagggtcggatcgtggttgatgaagcgggcgacggcctcgttgacatcggtggccttggcacgctggatgtccttgtcgagacggtaattggtgtaggcacgagccacgtcgtacaggtgagcatcaatgagggcgtgctcaacgaggttctggatgtcctcgatcttggcgggaccagcgtaacgctccttgatctcgccttcgacctgatcggcgaagccgcggatcatggcatcttcctcgggaccgacttccttgttcaggtcgccgaaggcggacttgatcgcagagatgatgttgatggggtcaaaatcgaccacacgaccatcacgcttctcaacgagaacggtggaggccttcgcggccgccttggtcccattgttggtgacgttctcctccagcacctgtgcgcccatcgggcacccctttcctcatcccgcgcggccttgcggaccccgcgttttcagccgcactcgtcgtgggccatacgaaattacattgatgtcgttttcttgaacctctagaagaatacggcaagctcacccctatatctagtgtccaacaagggtgtgttgaactatttatagtggtttttggctattttccgccaaaactacatctgtgtgattagcgtaactgtttcttccctagcgtgtcgcactccaccttccatcgattcctctcctttcggcagtacccatcttcttggacgggacaacagagcgtcgtcaccgcctccatacgacaagcatgacgcacccatcacaggaccggtagatttctaccgccatcgcccaccgcacttatagttaagggcatgactactgcaatgggttactcgaacacgggccagtcgccgaccgccgcatctttggcctcggccggttttggccccaacacggccaccgaagccgggcagggaaccgtcaacctgcccgacggcccgcggccggtcgaccagctcccaaggcttgccgcagagaccaccgcgcagaatccctggccggtcagcatgctgagccagaaattctatggggcggtggagcgctggccgtccgcgtgggtcacgggccagattacccagatcaacaccagacgggccggttcggcgtatatcaccctgcgcgacgatttcgaagacatcgcaatggaggtcaatggctttggacggtttgccgacacggcccggcaattcattcaaggcgatcgcgtggtcattcacggcaagcccaacctgtggatgaagcgcacctccctctctttgcgcggagacaccattctcaaagtcggcgcaggtggcagcctcaaggccatgatcgacgaattgcgcaagcgactcaaaggagaaggcctatttgacgcagaccataaactccctctgcccgaatttcccaagaccattggcctgatttgcgccccacaggcacgagccgagggagatgtcatcactaacgtgaatcttcgctggccctcggtcaccttcaaggttgttcatgtgcatgtgcaaggtgagcaatgccccggcgaagtcgcacaagcgattgcacgactggacaccgatccagatgtggatgtcattatcgtggctcgaggaggcggctcattcgaggacctcatgggcttctcggatgaacgcgtagtgcgtgccgcatatgcctgtaccacaccattgatttcctccatcggacatgaagacgattggaccctcctggacctggttgccgacctgcgtgcttcaacccctacggacgcggccaaacgtgtggtgccggacgtcaacgaacagacgcagctcattaccggagccatcgaccgtatgcgtctgagaattcgctcacgagtggataacgaagatcgcctcatcgagggatacgcaaaccgtcccagtctgacgcaacctctcaccatgctggagccgcatcagcgcttgattgacgattccatacagcgccttgatatcggcctgcgaagaatcgtggacgacgctcagctcaccgtcgagaaggcgcatgcctcactgaccgccctcagcccccagtccacgctcaaccgcggctatgccgtggtgcaatccgccgatggcaccgtactcgatgacgcttccaccgctcatatcggagacgacatcaccgtaaccttgaagaagggtgtcatcacagccacaaccacatccgccgcagcgtaagaacgctcgcagagctgctgcaagagaaactcaatgcgtatatagataaggagcacacaccatgaccgacaacaccacccccgcgtcttcactatcagacaaagaacgcgagctcattgcgcagatgccttatgaggaggctcgagataagctcatccaagccgttcaggcgctggaaaccggcggactgaatctcgatcaatccatgcgccagtgggaaatcggtgaagcattggccaaacgagcccagagcctgctcaatgatgtacgcgccaagctcgatcaggctcaggccgatcaggctgctaatgaagccacagcaggaacgcaatccaatctggactgattccaacatcaattcatgcaatcgtaccgtcggcaatacgccgaccatatgagaaaggacaaatcaatgtcaacactgattcttgtattccatccccacctgcagaacggctcccgcgtcaatgcccgcttgattgccgagctgaaggctcagggcgaagaagacatcatcatccgcgacgagtacgccgaatatcccaatttcgccgtcaacgccgatcacgagcacgagctgctcgaggcagccgatagtgtgattctgcaattcccgctctactggtattcctcccccgccctgctgaaggagtgggaggatcgggtcatcaccgcaggatgggcctacggtggcggccacgcactgcgtggcaaggaactcaaactggtggtcaccactggctccgatgccatcaaatatcagaaagacggcgaatacggccgtactatggatgacctactgagcccatttgaagttgtggcatataaggtcggcatggaatacgccaagccgttcctggtgcagggtactgccaccatcaccgatgacgcccttgaccaagccgccgccgactacgtttcggcgattctggactgaatggagctgaggccaggtgcgcgatacacctggccttattgtttttcacggatgagccgcagctctctccctcagtctcactgccgctcgacagctccctcttcagagggagcttgtttcctgtaaacttactggttacttcttgagcggcacgtagattacgttgtcgatgagctcctgatagtgcttgacgatttgcgcgcgacgagtcttcagactcggagtgagcataccgttggcttcggtgaactcatcgggcagaatctcgaacttacgaatcgattcggcacgcgagacaccttcgttagcggcattcaccgcacgctcaacttcggcatgaacaatggcgttcttggccaaggcatccaaatccggctccggcttggcaccttgggattccagccaattgttggcatccaccaaatccagcgtgaccaaggcagccacgaacggcttcttgtctccaataaccaagcactggttgaccaccggagaggtcatcacagaagcctccagaaggccaggcgacacgttcttgccgccagcggtgatgatgaggtccttcttacggccagtgatggaaatgaatccgtcttcggaaatatcacccaaatcaccggtatgcagccaaccatcagtgatctgctgggtagtgacctcagggttgttgtggtatcccttgcacaccagcggtcccttgactaccagctcaccatcctcggcgatgccggcggtgatgccgcacatcggcatgccgatggtgccgatgcgattgtcttccggcaagctcacgcacaccggaccacaggtttccgtcatgccgtagccttccagcaccggcatgccaatgccgttgaagaagtgagagagctcggaatccatcggggctccaccggtgatggcaaagtcggcgttcgggccaaagatggtacgaatcttcttgtacaccacctgcccgtagaaagcgtgagcaatacgaccgggaagcggcagcttctcgcccttctgctcggccttggaccattcacgcgcgttttcggcggcgcgcatgaacatcttgcccgcaaaaccgctgccggcacgctgggaagcggcgttgtagaccttttcgtacacacgcggcacggcaagcagcagcgtgggaccaaaggtctcgaaatccttgaccatggtcttcatattggagctcagggccagagaaatggtgccgccaaaactgaagaattccatgaatcgggcgaacacatggctcaggggcaggaacagcagcagacggcgattgggccatgcgccggcacgaggcatgtactgcagggcggagcgcaccaggaacgcgaagttgcggtgggtgagctccacgcctttcggggtgccggtggagccggacgtgtaaacgatggtggcgcggtcgtcgccgtgggaggcgttcttgtattcccggaattcggcatcggtgacgctttcgccataggtcttgatggcgttcaggccgcctgcttcgatgacgaacacgttgcgcagggtgggtacctcgctgcgcacggattcaatcttgtcgcgctgaccgtcatcctcggcgatggcgagcgtgaccttggaatcgttgaaaatccagctgacctggctggcggagttggtctcatataccggcacggtgagtgcgccgatggacatgatcgccatatccagagcggtccactcccaacgcgtgcgagacacgatggccacggagtcgcccttgttgacgcccagaccaatcaggcctttggccagatcgatgaccatgtcacggaagacctgggcgctgtacggctgccaggtgccatcctcagttttatattcgatcatggcgccatcgggatcgcgcctggctcgctcatcgagcaaatcgaacaggttgatgtcgctgtcgatcggctccttgacgggattggtgaactgcttgacgatatgagtatcgttattggccttgtcagcgatgttttcaggcatattcccatgtaactccacggaggatacaaaacacgccgattgacgctgcacgcccaatgcaaatggcctcgcacaccggcatccaccggaatgcgaggccatgcggcaactcaatgtttacatgcccagtccagactcagccaatggagccgttgctctttttcagctcgtcgcgaatctcctgcaacgtggcgagcgtctgttcttcgacacttgggccttcttccttggcttcggcctcatcttgagcggcggtcaggtcacgcaacttgttgataggcagaatcacgcagaagtatacggccacaccgatgagcaggaagttaatcaaagcattcagaatagcgccgaacgaaatggtcgagttattgaacgtaatggtcagcagaccagacaaatccggcacgccaccgatcatgccgatcagcgggctgatgaggttatcgccaatggaagtgaccacggtggtaaccgcggagcccataaccacaccaacggccatatcaatcatcgaaccgcgggaaaggaactttttgaagccggcaagcgggcctttatcggtcaacgcaacgaccgcatgagtggcgctgcccgcacttttcacaagattgtcggcaatattggatggggactgatttgccatgatatctccttaacagcgcaaatccgcgaaccgacccgatgacctgggctcgcctttcattcgccattatgcttcacgagaaaccgtatgcgcggttattcgacaacatatcggcagaaaaccagtattcatgcgcggatttacgcgggcaatcaccactgaccacccgcgttgcgactctcacgtttcagaactgaatatagtcgatctccgtatgttcgccggtctccagatactttgccacgtcatccggcccagcgaataccagcttgaccgcctgcgcaatcatcagattcacacgatccatcggcgtcaggttttcgaaatagccgtataccggaataccaagcgcgtgagcatacccgacctcgaacatggtgccggggtcttcatccataagattggcaacaaccgcttgggatgcgttgatgccctgaatgtcatcgttgaagcagccctcggggccgacctcctcgatttggctggcgaatcgcggcttgaacagtgtcctgccgtgatcctccagcaccttctccaaccgttccatgctcgccgtctgttcgggatcgaaaaacgggccggccacatagaagtcatactgcttgtcttcactcatggtttccagtcatagcgcagcatcgtccatttgcgggccacaagttcaatgcatggatagccatccgcataatgaccatcaggagcgcaagtgcccgagatcggattcgaaccgacgacacccgctttaggagagcggtgctctatccactgagctactcgggcaacgacgtttcattgtacacgggcagtcgcccagcccacaattcgtgccggtttggtacggaaccgcgctgccgccgccggcgcaatgccgattcacaagtcgaacaaggtacagtggcaggtcatgggacaagctgcatcaccatgcatcgacgttccccacaaagcaaatcaacgcaggaaaggcgatatggcacagtcacggaacaccaccagaggaaccacaaccaaagggaagtccgcacgccctcaaaccacccgttcgcagtccaagtccgcgcaacgaaacaaatcctattcccgtcctgtatcacagtcggcactcaaacctcatgagcgtcaccatttcttcggcacgctgacattgctgctggccatgactgcccttatctgcaccgccgcacgcgccttgccctcggatatccaagcctggccgttcatcccaatcgtagtgtcggcaacaccatggttcaccttgcttgccctgcttgcactgttgctggccatgccattgcgccgcccattggcggcattgattgccgttgccgccctcggactgaacgtctactggcagtacccgtttttcttcccgaccaactcactttcccaaaacgcacagaacgccgtagccgcggccgaagcgcacaccgccgacacctatgcccgcgtgatgaccttcaatgtctacaaggggcaggccgacgcccaatccatcgtcaatctggtacgcgatcagcgcgtggaagtgctcgcgctgcaggagaccacggatgatttcgtcaagcagctgaccgaagccggcattgaacattatctgccgtatgcgcacgtatcctcgtccgatggcgtgtatggcaacggcctctggtctgcggcaccgcttaaggacgtggtcgacgacgaggtgaattccagcgcctcattcatgccctccggcacagtggacatgggaggcaaccagattcgtttcgtctccgcgcacaccaccgcacccgtgcccggatactggggccaatggaaacgttcgcttgacgaacttggcctgatgcgcagccacacggacgcccgctatattttcatgggcgacttcaacgccacctacgatcacacgccattccgcgaatttctgggcaatcgattcgtcgacgcagcccaccagtccggacatggcttcacgttctcctggccgaccaaccgcagctatctgccaacgtttgccggcatcgatcatgtggtgctggacactggtatgacggccgggcaatgccaaatcgccaaaatcgcaggctccgatcacgcggcactactcgctacgatttcggtagggtaatacttgctcccgctggcgggagctggcgcacggagtgcgactgagggtggtctgaagccgtacgatcattgatcaccctcagtctcgctttgctcgacagctcccgccagcgggagcagagaaagtgtcaaaaaccgagacgggtgcggccgaactggtcgagccaacgcaggatggcgccttcgcgcaacgcccacgggcagatttcaacttcctgaatgttcagggccttcatgatctcgtcagcaaccacgccgccgcccacaatctgcattgtgcgctcaggcgtgataccgggcaacgccacgcgctgttcgggagcaatcgccgccagacgaggaatccaatcctccagctgctcgcgggtcatgatccacgtatcttcacgcccagacgcacgaatcaccgcgccacacaagcgagccagcgaacggaaggtcttggacgtgccaacggcatggttcggatgtttggattgcgggaacaccttgaccatcggcgccagaatcttacgcacatctttgcgcacgtcctccagctcctcgggagtagccataccggaaggcaggaactcggtggtcacacggccggcacctgccggcacggaaagcgccacagtcggctcttcatcggagcccatcgccacttcgagcgagccgccaccaatatccagcaccagcaatcggccggcatcccagccataccagcggcgggcggccaggaacgtcagacgcgcctcatcattgcctgacagcacagtcacgccctgaccgatcatctcttcaatcttatgaatcaccttgttgccgttcggcgcctcgcgcaaagcggatgtggccatgaccagcaactgagtgatctcatattcttcagccaatttcatgcactgggcaacggcggccagaatcgcctcgatgccggacttcttgattgagccgtcatccttgagatacttcatcaggcgcaccgttgatttggtactggcctcaggatcgggacgcgcgcccggagctgcatcgacaatcaacatatggatggtatttgaaccgatatcaagcacaccgagccgcgtggtatgcgaacgcagattgaccatgattcctgaccttacctaacacaaacgcgactactgtacaacagcccagcccattacagcgattcgacgaacctgtcgagtcgttccaagccttcggacaacgcctcgcgagaagcggcatagctcaaccgaacatgcgtatcggcggtggcggcaccaaagtcgcggccaggggtcaacgctacatgcgcctcatccagcgcacgctcgcagaacgtccatgcatccaatccggtacgggaaatgttgaagtaggcatagaacgcgccgttcggctccacttcgaccggcagtccgatgcgcttcaaaccatcaattacgatgcgccgacggctcagcagctcctgacggcgggcttcacactcagccaagctctccggcgtgaaacaggcgagcgccgcatgctgggtgggcgtatgcgcacacaggtaataattggtggccagatcatcgaccgcctccagcacggtggaatcatccggcagaatggcccagccaagacgccaaccggtcatgccgaagaacttggagaaactgttgcacacgatggcgccagggtcacaagccagcaccgatttgacctcagtgccgtccggctcatgatcggccagatcaagataggtctcgtccacgatgcgccatgcgccacgcttggcggccaactggcatacttcatccagcacggcgaagtcgatggtggtgccggtgggattggacggcgaggtgatcatcacggccttggtgtcgtccgtccaatattggcggcataggtcggcggtcagatggaaccgcgtggcggccgatgtcggcacatcgacaacccggccttcaaaggaacgcaccagctcgcggttgcacgggtaggagggatcggccacgatcacgtcatcaccgggatccacggtcagggctgtggccaacagcaaagcggcggacccaccggcagtcacgcagatgcgtttgggatcgatatccaaatcatggcgttctcgatagaaatcggcgatggcttggcgcagttcgggcaatcccatggctgcggtgtagggcaaggcacggccatcgtattgttcgcgcatggcatcgcgtacggcaggcggcgcaccgaaatcaggctcccccagactgagcttgatgacactgacaccggatgcgatcatcttgtccgctttctcgccaaataccatggcgcggaagggattggcctcgcgcgcgcgacgagacataaccggggacacgggctgctgcactgcttcgttttccatggttcggttctatccgctctcggggacaaggtttttccgtggctttataatcgccggggagaccggttaccacctcaacccaagttcaaggaggaatgatgagccgattcaacggcaaacgcgccgaatttgaggccagcggcgagaaaatcaacgttgctattctgggcgcaggacgtatagctcacaccatggccaataccttggtcgaaatggccaccgacccgctgtattcctcatggattcacccgtatgccgtggctgcccgtgatctggatcgcgcacaggcattcgccaatcaatggcatctcgacaaagcgtatggttcgtatgaggatctggtggctgacccggatgttgatttggtctatatcgccactcctcataatctgcatgccgagcaggcgattttgtgcatgaaagccggcaagaacgtgctcgtggagaagtcgttcaccgcgaataccgcacaggcgcgcgaggctttggccgtatccaaggaaacaggactgctgtgcacggaagcgatttggacgcgttacatgccaagtcgtcaactcatcaatgaggtcattgcctccggagaaatcggcgaggtgaaatccgcaagcgccaacctgtgctatccagtgtccggcaaggcccgcatgatcgatccggcctgcgccggcggcgcgctgctcgatgtaggtgtgtatccgctgaacttcttggatatggcggtgggtgctgatcacggccgcacattggatcatttcagcacctcgatggtgccgtatgaaaccggcgtggacgcacagaattccaccacgttgtattacagcgacggcacgatggcggtatccaccagctcgatgctggtggcctccgatcgcggcggatatgtgtggggcaccgagggatatctggaagttaccaatatcaacaatcccgagtccatcgatatctacggcaaggaccacaagcccgtgcgcagcatctcggttccgccgcaattgaccggctacgagtatgaggttgccgccgcggccaatgccctattggacgacaagaccgaatgcgaagcgatgcctcatgccgacaccattcgcattatggagcttatggatgcgattcgtggcagttggggcctcaagttcccgtttgagcagtagttgtcctcccgctggagggagatggcacgcagcgtcggagggtggtcctgcagaccaatcgatgtcgacctcccctcagtcacctgcggcggcagctcccctccagcgggaagccagaaggacacacaatctgttcgtatagccgtgcgagacgcccgtctcgtgcggcttttgtcaattcgcactcccacacggtgatcacacgccagccggaggcctctaattcggcgcgctgggcgatgtctcgattgtggttgcgcaacagtttcgcctgccagaattccacattcgacttcggcatcgaatgtttggaacagccttcatgcatatgccagaaacagccgttgacgaacacgatggtgtggtatttcggcagtaccacgtccggatggcccgggtagcgcttgtcgttcttgcggaatctcaggcccctgcggaacagatagctgcgtaccagcacctcgattttggtgtctttgccgcgaatatgcgacatcgtgtacgagcgggtgccccgttcatacttttccactggctgcttcttacgactcacgcactccagactaccgtgtcatatcggtacgagacgatatccgatcgaacgatcacccattgcatgcggtcgtcatttcttattccggtcattcctcgcacgctggtcgagaccgcgcacttacacttcacctatggcagacatgacgattcgcagggccacggcggccgatattccccagattgatgaactgttgcggcaagtgctcgaagtgcatcacgccggccgaccggatctgttcaaaggcggcgccaaaaagtacacggatgaagaactgaaaacgattctggccgacgatcaaacccctgtgttcgtggcagtggcaccggccgacaccgccaatgccggcgatgccgaatcagtcagcgccgcacactcagctgaagaatccggcaacaccggctccctcgccgtcgatcaagtgctcggctacgcattctgcgtattccagcaacacaccaacagtaatattctgaccaatatcaagactctgtacatcgacgatctatgcgttgacgagcgctctcgtggtcatcatgtgggctccacgctgtatcattacgtgctcgatttcgcccgcaaattcggctgctacaacgtgaccctcaatgtttgggcctgcaatcccaaggcccagaccttctatgagcgcatgggactgaccccctaccgcatcggcatggagcaggtactgtaacccactcatcccaacagatcgagaaggtcgtccctggtgagggtggcgatagaggcaggggcttcggcaaagacagtggtgccggtgccggtttcgtcggcgagcggggaggcatcggtgaactggcgggcaagttcgctcttggtgtgctgaagctccaagatgcgttcttcaatggtgtccttggccaccacctggtacacgttgacgtcttcggtctggccgatgcgatgggctcgatcggcggcctgatcctgggcggcggcgttccaccatgggtcggcgtggatgaccacgctggcgccggtgaggttcagaccagtgttgccggccttcaatgaaatcaggaaagcgggcgtatcgtccgcgttgaactggtcgacgagttcgaggcgcttccttttgggcgtggaaccggtgatggtgtagtagcgcaggccttgcgcgtcgaaacgttcggcgatcagttcaaggaaactggtgaactgggagaagatcagcgccttcttgccttcgttcacgcaggtctccaccagctcggcgatggccgcgagtttggccgactggtctttggcatcggcgtacagcaaccttggatcgcagcagatctggcgcagtctggtcagctcggcgaggatacgaatcttcgaggtgttgaagtccgcctcctcgctgtgttcgagctgcatgcgcaggcgctgctcgtgagccgcatacagcttgcgctgttcgccggcaagttgcacggtcagcgtggtttccagcttgtccggtaggtcggtcagcacttgggacttcagcctgcgcttaatgaacacgcccaccagcgactgcaattggtgggacacccgtgccgcctcgggatcgacctgagcagcggcacggccttcttcggtactggaatccgcggctctcgcgttggagatgggcagttcataccgttcatggaaccgcttgtacgtgccgagcaagccgggcatgaggaaatcgaaaatgctccacaattcggaaagtcggttctcgatcggcgtgccggtcaaagcaaaacgatggtccgccgctacggccttaaccgctttggcaattttggtggtgtggtttttgatgtattgagcctcatccagagccatgacgttgaaacgccgctcatctgcggtgtagtcgtctacatcccggcgcagcaaatcgtatgaggtgatgagcacagtgggctcatccgcacggaacgcacggcctatggcagtgcgacgctcggatttggtgccggcaacgaccatggcattacagctgggggcaaatttggcaaactcggcagcccagttgtataccaacgatgccgggcagacaataagcgaaggttccacaatcgcaccatccgcagtgccatccgcacgacccggcttccgatagcgagacaacaacagggcgatgagctgtacggatttgcccagtcccatttcgtcggcaagaatgccaccgaatcctttgtcgcacaaggtgttcagccaccggaagccctcgacctgatacgggcggagaacgggcttgaggctgtccggcacctcgtatgatttggggtcgatgattttgaggtcgtcaatgtattcggtgaaagatgcatccttgaccacatcggaaccgtcatccggcagttcaccgtccagcagaaatgctctgccgcccggcaattcaatcagcccggaattgagctgctgctcgtccaaatcaagatcggcagccagcgtatcaagcgtattcaggtttgcgccctcaagtttgagcagcgtaccgtccttcaactggtgatagcgctgacgacgccgataggatacgagcaaggcaccgacctcgtcaggcggcacttcatcggcaatgggcgagatctccaccagattgcccttgatggacaaaccgactttgacgctcggcggcttgggtgcgatgagccggtcgaacgcaggcgtggtgaacacctctcccacctcatgcaacgccggcagaccttcatcgaacaagcggataatctgtgtggtgtcatcacggttgatgacggcggcctcggacgcacgcgcgcgggccttggcgcgggatgccggggtcctgaatccggcagtcgcctgtctggtttcggccaacttgcgccgctgctcctcaggcatggagaagaactcacttaccacgtcaagagccagatgttcggtatcaaggtcacggccaggcaccgcgaccggcatgccgccatcgtcggcgctcacagcgggcccagccggcagcagcggcaccattacattcccatagcgggccttggcctcgcattccacgccgttttccgtgcgatccagatagaacccaacatggcactcggcaggactcagctcagaaagttcacgcgggatgtcatcggcggcaagcatgtctacattcaccagttgcggcaataacgtgcgggcgaacagagccgaatcgtctccggcgatgacctgcccctcaccgtctggcgcaaacagctcaccgataagttccgcaatcggaccgaattgcttcgggcaacggacgaaccggtatcctgcggcacttttgcgccgcgactttgccatcatggcggaggtgtaagccaaaggctcggacggtgcgagcaacagccaagattcacggtcaccgttgatgacggtctccaccgaaggcgttccagtcagcaaatacccggcttccgacccgaacacacgggaatcgcgcctgacgatatgcatggtcaggtttggttccccgccaaccgataccggcgaaggctggctggaaaaccaggtgtccagcaccagttgcacgcctacgctttcacgcaaaaccaatagcgaagccacttccgtctcggatagtgtcaggtgacggtcaatggcaatacgcccgtaataccgatcctgctgttcggccgcgtgacgtatggcgagcgcggatttcaggaatctcagcaatgggcgggaatccgcatcaagcatatccggcgtatgcgtgaacgccaatttctgcccgtaatcctcatgatcgccgttggtcatggcccgcacgaattgtgggatggatttcagcacatagctggaggagtttatggctgagccaatcttgaattccacactccaggtaccatcgatgaagctcaggatgggtgtaagtctgacctggccaaccgagacggtttcacgcaaaccctgatatccgcccattccggaaccatacccgttccgattgcggtggctggaaacaccgcgcccagccgtaccgccgccatcaaaccgttgcatgacggcgctgcgtcgacgagccctgacctgcgcatcttgcttatccgcgcgttccatgtagtcaagcaacgcgcgcgaaggccgcacggcaccggcatggtatcccttgaatcgttgtggctcatcgcagaacatcaaggcgagagccgccatatgcttgcaaatgccatacccgcgtccataagccgggcaggtgcaatcaccgccagccacttccccggtgtcaaggtcgaactgcagattgacacgataccggctggagggactggtggtgccgcgcatcatggcgccgagttcggcatatccggtacgccgattctcgtcataggtggggtcgatgagcatactggccgctttgcgcgcgatgacgcgggcacgggccaatacggcgttcgaggtggaggtttccacatcacggcgtaatgccgcaataggcgcctgccggacaccttgctcattcaggccgttaatctcatcctcatcatcgaaccacacggaacgacccggccgacgtgactggctataaggaacaaccgcatcctccgcactgagtgatccagtcgagccgaatgtcacatcatcattgccatcatcatcaacaccaacgaaatcgccgtcatcgggcaacatggattcgtcaccatccgcattcgcgctcttccacggattgcgacgcctcagcccattgccccaagccgcattgtcatcttcgtaatcggagtcgccgccgccatgggaggcatcgtcaggaacatgcccgaatacgccgtatccgttattcatggacccctcccccgattacatgtttcaggccaacatttccatcttagtcgagtgtctcgcgagccattacgcggaaccaagctctcggctaaccagacatgacgctaaggtggtaaccagcaaaacgctgcacatcgttcaacgatgtggagcagcaagcgataaaggagcatatctatgagcgaagcgcgtaccgcatggggctggggtctggccagcgtcgatgctgccggcaccaccttggacgtctggtaccccgaattgactctcggcgaggcacccgccgagtccgaccgaccaaaccacaacttcggcacattggcccacacggaggccgacgcccgcggcatccgtcgcgtgccggtgttcgccgtcagccagctggatgagccaatcgtcaacgcagccgacgcctacctgaagcttcacctgatgagcatgcgcatggccaagccgaacaccctgaatctcgatggcatcttcgcccagctcgccaatgtggtgtggaccaattacggcccgttcgccgtggaggatttcacgttgcgcaaggccgacgtggaacgtgccgccaccgatgcggctctcgcttttgccactcaggcgggcctgtcggccgcagctcctgcccccactgtcaacgtgttcggtgtggataagttcccgcgcatgattgactacgtggtgcccaccggcgtgcgtatcggcgataccgaccgcgtgcgtctcggcgcctatctgtctgccggcaccaccgtgatgcatgccggattcgtgaacttcaacgccggcacgctcggcgtctccatggtcgaaggccgcgtctcacagggtgtggttgtgggcgacggctccgacatcggcggtggcgcctccattatgggcaccctctccggcggcggtaagctgcgcaactccatcggcgagcacagcctgctcggcgccaacgccggcatcggcatctctttgggcgacaattgcacggttgaggccggcctatacgtcaccgccggcaccaagatcaccatctgggataaggccaaggccgcggccggcgaaccgctggaggtcgtcaagggttcggacctctccggcaaggacaatatcctgttcatccgcaactcggtgaacggccgtatcgaagcccgctaccgcaaggtgggcatcgagctcaacgaaaagctgcataagaactaagcagtcagcccatattgggcgcctagcggttatgtaaacgcctcatttggtattccagtgaggcgttttctcttactacccgagggtttgccccgctgacatgttctcagcggggcaaacccaccagcaaccctgggttttgcaccgataagacgatatcagcgaagcaaaaccgcgactaagtcaacaaaccaccccgctaaagccctctcagtgcggcatagtcacaacaaactcgagggtttgcctcgctaacacaatctcagcggggcaagccctcgggtgaatcaatatttcttacgcaaattatcatgtagcgagcaatcagctcccacatatcgaacaaaccggcatcaccggaccacgcagagcatttagcgctcgtccatgggcacgtagtcgcgctcgaccggaccagtgtagacctgacgcggacggccgatcttggtgttcgggtcggccagcatctcacggtactgggcaatccagccaggaatacgacccaacgcgaacaacgtggtgaacatggccggatcgaagccaattgcccggtaaatcagacccgtatagaaatcgacattgggatacagattgcgcgacacgaagtattcgtcattcagcgcaatgtcctcaagctccgtggccacggcaaataacgcccgctcatcggaaggcagcttctgcgtatcctctcgttccatgatcttttccagatacttcttggcaatcgcggcgcgcggatcatacgacttgtatacgcggtggcccaggccggaaatcttctgacccttggccttggcatcctccacgaattcgcgcacggatttgccggagtcgcggattgccttcagctggcgtagcacggcctcgttcgcgccaccatgcagcgggccggacagcgcattgacaccggcggccaccgccgaatacaggttggcatgagccgagccagcaatacgcaccaccgaagtcgagcagttttgctcatggtcggcgtggataatcagtaagcgacccaacgcatgtacatacaacgggtcggactcgaatggctcatacggcacggcaaagcacatacgcaggaaatcgtccacatagccacgcgcataatccgggtacagcatcggctcatcacggcgacggcggaaaatatacgatacgatcgtgcgagccttggccatgatgatcttggccgactcatcaagctgatcggtgtcggcgatgtcagtcgtatccgggtagaacgtggccagcgcgttgattgcggaggcaagcacactcatcggatgcgcggcacgcgggaacgagcccatgaacgtgcggaaatcctcgccgaccatggtcttatggttgatgtcggcgcagaactgctcgtactcggccttgcttggcaattcgccatgacgcagtagccaggcgacctcaagaaaatcggagttctcacacagctgctcgatcgggtagccgcggtagcgcaaaatcgaatgcttgccgtcgatatacgtaatcttcgactcgcactgggcagtggtcaggaatccggggtcaagcgtcacccagccgtcattacgcagcttggaaacgacaatgccatccggtcccgcactcgccttcaccacaggcaggttgaacttgctcgaatcgacatcaagctgtgccgtcgccatgcgcgcgccttcctctttatgaaccgcttgttcgaacaccaacatttatgaacattggtgttcggtactgtatgtcttttgtgttaccgccaacgaatgccggtcgatacacgaaagccgaagtgcgctcatgctatcaaagcaaatgcacttcggcttgttacgtctcgaaatcgcggaaaaaccgcgaacattcaagcgcttgcgtcaatcagaggcttgagcgatcggtgaagatgatcggaccgttctcggtgatggcgatggtgtgctcggagtgagcaccgcgcgaaccgtcggaggcgcgcagggtccaaccatccttcggatcctggaagatctcgtcggtggtcttgaggaaccacggttcgatggcgatgaccaggccttcacgcagcttgtagccatggtgggcgcggccatcgttcggcacatgcggatcgccgtgcatgatgtgacccacgccgtggccgccgaactcaaggttgatcggatagccgtattcgcgcgcgatatcgccgatggtattggagatatcaccgagacggttgccgggcttggccacgtcgatggcggcggcgagcgcttcttcagtgcacttgatgattcgcaggtcttcggggtcgggatcgttgccgaccacgaaactgacggcggaatcggccacccagccgtccacggagatggcgaggtcgagggagacgaggtcgccgtccttcaggctgtagtcatatggcacgccgtgcagcacagcgtcattgacggaggtgcagatgtagtgggcgaacgggccagtaccgaagtcgggagcgtagtcaacatagcaggattcggcacccttgcggtccacgatcttcttgtggacgaactcgtcgatttcgagcaggttggtgccgaccttggtgttctctttcagttccttcagaatgccgccgacaaaacgaccagcaggcttcatttcctcgatttcacgaggggttttcagttcgatcatgaggctctttctaccttgttgagacttgttctcaactctagtccagcccgaggtcaactgccagcgcccggcaccgccaagcgacggcagcgggtgcggccaagaaaaagcgcccgggcaagtatggaacccgcacggacgctttggcttgatgacttggtatctactttctgggcttgccgaaagtgaaagcgcggataaccgcggtgatacccatgacgaccatggcgcatcctccaaacaccaccatgaagaccgcagagctcagcggactcatcagcacgataaagccggcaacaatcgagataatcgcataggcgatggcccatcccgaatgagggatacgccacgattccaccagcgacatcacaccttccatgatccagccgaagccgaccatcatggtgatgagcagcgccagtgtctgcccggtcataccgtagtttctgacaaccaccacgccgccgaaagtcagcaagataccgacgaacacatccagcacacgccaaccggccggcaggaacggctccaccaaagcacccacgatgcgcaccacaccggagatgacgaagtagacaccaagcagcagagccgccagagccaaggtcttgttcggcacgagcaaaagggccgcgccaagggcgatggcagcaacgccaactacgccgtagatcacacgaatcttggtcttggccttttctggcaaccattcctcaataagacggaacgggttgaaattgccggtataccaattggtctgctgccagccggactggtcctgatcgttgcgttgttcatcagcttggtatggctgaccatttggaccgtaacccgggttatatgcatatgggccataatacgggttctggcccgggccaccctgcggtccctgcggtccctgcgcaccctgcgtcgggaattggccgccgtgattgctgtcatacgcaccataccgtggttggccttgctgaccggactggtcttgccggttcggctgaccattccactggccgtcattcggatcgcccatcatgactcctttcatcaggtcacattcaagcttcatctaccacactagacaggttatccaattcagaccatcatcaaaactaggcaatatgtctatttcacttacggcgcaacgttgtgacgaccgaggaacgcttctcccccgccgcgattaggcttgaggccatgaccaacgaaaccgaaacgctgacgtcgggcattgacccggcatcgttctcctccgtcatcaaaccgaccaacgacctgttccgctacgtcaacggcccatggatcgacacctaccgcctgcccgacgatcgttcgcgctacggctccttcgacaagctcgcggaggattccgaaaaccaggtgcacgagattctcgaagacgatgactgcccggcaaccaaatcacaggccttgtatcgctcgttcctcaatacggatgccatcgaagccgccggcctcgacccgatccgcgatgaacttggccttatcgattcctccatcgacaaggccgccctcacgcgcgtgctcggcaccatcaacccaactggaggccccgacctgttcggcctggccgtatacggcgaccccggcgacccggaccgcaacatcgcccacctcgagcaggccggtctgtgtctgccggacgaagcctactaccgcgaagaccactacgctcctgtacgcgaagcgtatgtgaacatggtcgccacgcagcttgtcaatgccggctatgctccagcagctgaagacaaccccaacgtggatgacgaactgccaaagccgcaggacgaggatgaaggcaatgagccgaccaccgcaacccccagtgaggccgcccttgatatggctcgccacttccttgccgtggaaactaagattgccgccaaccattgggacaatgtggccacgcgcgactcggtgaagacctataaccccaccgattacaacgacctggccgccacactgaagaacttcgatctcgattcctggattgacgcctggcagtccgcctatgatgccaccgagtccgccaaggcccagccgattgacttcgagtccgtgttcgcgcgcgtcatcgtgcatgagccgagcttcctcaccggtcttgatgcgttctgggccgaagccgatctggccgatctcaagctgtgggcccgtgtccacatgatcctaggcttcgcttcctcgctgtcccacgacttcgacaccacaaacttcgacttctacggcaaggtactttccggcgccaagaagcagcgtgaccgctggaagcgcgcagtcagcctggtcaacggcatctgcggcgaagacgtgggccgcgagtacgtgcgtcgtcacttccccgaaagctcgaagcgccgcatggagggactagtcgccaatctgattgacgcctaccgcgcatccatcaccaattccgattggctgggcgaagacaccaaggccaaggcactggagaagctctccaaattcacgccgaaaatcggctacaccaaccattggcgcgactactcggcattgaatccatccgcagacgcgctgccagccgagaacgccaaggccgcaaacctctatgagaccggctaccagctggccaaggtcggcaagccggccgacaaagacgagtggctgatgaacccgcagacggtgaacgcctactacgagccgagcatgaatgtcatcgtgttcccggcggcgattctgcagcctccgttcttcgatccgaaggccgaagatgcagccaactatggtggcatcggcgcggtgatcggccacgaaatcggccacggttttgacgaccagggttcgcagtatgacggcgacggcaagctcaacaactggtggaccgatgaggatcgcaagaacttcgaggcccgcaccggtgcgctgatcgcccagtacaacggttttgtgccgcagcagctggccgagaaatacgccgacgaaccggacaaggcaccgcatgtcaacggcgcgctgaccatcggcgagaacatcggcgacttgggtggcgtgaacatcgcactgaaggcgtatgcttttgcgctcggcaaggctgccggtaaagcggatgccgaggaagacggttcccccgctgccataaaggcactgctcagtaccgcccccgagatggacggcttcactggtctgcagcgtttcttcctgagctacgcctccatctggcgcaccaagaaccgtgatgaactggccgagcagtacttgcaattcgacccgcattcgccggccgaattccgcaccaacggcatcgccagcaatgtggatctcttctatgatgcgttcaacgtcactgagggcgacgccatgtggctggatcctgacgcccgcgtgcgtatctggtaattcctccaccaatcaatatcggcctgtaatccttcgcaagggtgcaggccgatatcgttttggccgcatctagaactcgtccgtttcctcctctgtagcattcgcagcaccaccggcgaaagctttctggcttgcggattgtgattgacctgcatcggcattcggcgccgaaacttcactgtcggcatgttcttggtctcgcgtcgcattggattgatcaccttgatcgttctcggtgatgccgaattccactggcttcgttccggctgcattggcataggggtcggcgcccggcccggacccggcatcataggactgccgattctgcagattttgccgggatgcctcatcagtacccgcattggcattggtgccattgcgctgcgccttggcaagagaagtggtgccaaaagtgagatcatggccgatattggtggcttccacaacggttttgctacgggcctcgccctgctcggtagtccactggtccgtgttgagcactccgaccaccacaatgcgatcgccacgtcgaaccgattgtttggtattttttgccaacgcgcgaaatgccttgaccgtaatccaggcggtggcaaaatcctcccactgctgtgtgctctgattaaacctgctacgggtgctgcccattcggaaggtcagcacgggaaaagtgtccgttccgcctagcacgggatcgcccgccacaaatccggtaatagttactgctgcctgttgaatcgccatgatcggccctttctcacgtcactgttgtggaccgccggggcctgtctatggcgtcatcaccaatgcacaccccaacggtatctccactgtgaagtgccgcaccgtagcagcacaagggcaaccgacaattgtggataccgtgacggggttgcattttttgtactgtggataattttgggttatccacaattaggagcaaaaaagcaaaagcgccaccctgcaaagagcaggatggcgctgtaattatgggctatcagccaccctcagccgagagcagcaaaacgatcggccaaggtaccggcagcttcagcagcgggcacggcgaccttgttctcgccattgcgatcgcggatctcaatggtgccatcgttcacgtaatcgcgaccgaccacggcgaccagcggcacgccgatcagctcggcatccttgaacttgacgcccggagagaccttcttacggtcatcgtaaatcacttcaaggcccttggcctcaagttcggcgaccagtttctcggcaccttcgaatgccttttcatccttgccggtggccaccacatgaacggcggccggagcgatcacggacggccaggccaagccggcctcatcgtgatgcgtttcggcgatgcaggccagcacgcgggagacgccgatgccatagcagcccatccacaccggcacggccttgccgttctggtcgagcaccttcaggtccaatgccttggaatacttgagacccagctggaagacctgaccgatttccacaccgcgctcaaagctcagcgggccggaaccatccgggctcatatcgccgtggcgaacctcaacggcctcgaccacgccatcggccttgaaatcacggccatagaccaagttgtagtagtcaacctcgttctcatcagcaccggtgaaccaagcggagcccttgaccacgtgcgcgtccaccaagtaacgcaccgggttcttcacgccagcggcttcggcctgcggaccaagcaccatcgggccgatgtagccgggcaccagttcggggtggttcttcaggtcttcctcggtggcctcttcgagctcggcgggagcgaactgggcttccagtcgcttcatatccaccgtgcggtcaccgggcacgccgacaacgatcacttcgcgccacggctcgtcatgctcctcatcctcagggtgcttgacggtaatcaccacgttcttgaggatgtcggaagcctgccattcgcggccatcggtacgcgggtggtcggcgttggcacgctcgatcatgttgtcgatggtcttggcatccggggcggcttccttggaagcggcaggagtgttggaagcatcgacttcaggcagctccggagtggtcaaagcctcgacgttccaagccttgccggaaggagccagagcgaaggtgtcttcaccgatcggcatcggggcaaggaactcctcagaagcagagccgcccatcggaccggacatggcgaacaccggcacgtacttcaagtcaagacgctggaagatgcgctcgtaggcaccgcgctcgtcgtagtaggccttgcgcatgccttcctcgtcgatggtgaaggagtaggcatccttcatgatgaattcgcggccgcgaatcagaccggcgcgcgggcggaactcgtcgcggtacttggtctggatctggtacagggtgacgggcaggtctttgtaagaggagtacatgtccttgaccagaagggtgaacatctcctcgtgggtgggggccagcaggtaatcggcctcgtggcgatccttcaaacggaagatgttatcgccgtactcctcccagcggtgggtggcctcgtagggctcgcgcggcagcagagccgggaagtgtacttcctgagcaccgatgccgttgatctcctcacgaataatatcttcgatcttgttaagcaccttgagacccagcggcagccaggtccagatgccgggcgcggccttgcggatgtagccggcacgctgcagcagtttggccgaatcgacatcggcatcggcgggatcctcgcgcagggtgcgcaggaacatggttgacatgcgaagggtattggaagtcataggttccaagatattcgcgtgaaccgacaagctaagtcgtcacaggttccgtttccggccttaatcttggcatacggacggttctctatggcagaacgactcgaggcaaggccatggcctggctgaagagacgtttcatcaccatcgcccggcgattgcggtgccacattgcgggcagtgaccgttgccgccggagcttgctgataggcggtcggcgataatgcggtaccagtcgcgctcgatgagcttcgcatggcactgcgggttcggacaatacgtagtatcgccctcgcggtcatgcacattgccaacgtagacataatggagcccttcagcgagcgcgatggcgcgggcacgggtcagcgtctcgtgcggcgtaggcggcacatccatcatccgatagctcggatggaatgcggagaagtgcagcggcacgtccggccccagatgttcgcctatccacgtgcattcggcgtgcagctgggcatcgtcatcgttgagaccggggatgagcagtgtggtgacttccacccacacgtgttcgccttctggggtacgtgcctcgttgaccgcatagtcgatggtcgcgagcacgtcggccaaatgcgtgccggtcactttccaatagaaatcttcggtgaagcctttgaggtcgatattggcggcgtccatggcggcatagaagtcgggccgggcttcggcactcatgtatccggccgtcacggcgatgggatggatgccgagtgcgcggcaggcttgggcggtgtcgatggcgtattcggcgaacacgatggggtcgttgtaggtgaatgccactgagtcgatgccacggctggccgcgacctgcgcgattttctccgggctggcccccacactgagcttatcgatgctgcgcgctttggcaatgtcaaaattctggcagaagcggcagccggaattgcagccggccgtgccaaaactcagcacactggaaccagggtggaagtggttgaggggcttcttttccatcgcgggtcttgaaggtaattgcctttggctcccccagcaccgacacctcgatattcagcagtgggtaatccgcagcggtgaccgggttgaaacgtgggtcacgggtggcggcatccaccgcatgggcgatcacatccttgccaagtggttgatgagcaaccagcgagccaatgcagccgcgcaccaacgtcattccgccgtctttaagtgttgtctacttgggcatcagcccctcgaaacggagatagatgtcctgaaaactcaaaatccgccccttgaaacgcagaaacgcttacattagtagtcgttcggcatagcaaccgtcagaacaaggcgtcttgggcgaattcgtcattgggatcggcagcgaattcgtctggctcggcgggtttgaatgcgcctgcgccttcatcggccaactggtcggaggccgaggccgaggcctcgcgcaggtcgccgtcaagcaccacggcatcgggtgagacaaggaacatgcgctcgttgacaccagccaaatacagtccgcccaatgattcaactcgggagagcgccacatatcccatgcccggcgcgaaggtcctcttcaagtccataaccgcgcgatcgagcgtcataccctgtgacttgtggatggtgatgccccacgcgcagcgcaacggcacctgagccacggaagcgagcaccgtctcgccatccatcatctcccacttggcctgtttcatggtgacgatattgccgttctcgaattccacaatcggccaaccgcctttgttctcctgcgcaaagccgcgcacggtgccgagcgaaccattgacatactggcggtcggggtcattgcgcagagccatgatggccgcgccttccttgagcacgagccgctcgggggcgagcatgttcttcttgagccgatcgaccagattggccggtcctgcggtttcggcatggaactcatgaggctcgagcatgatctggttcagccgcatgtcgttgagattgtcggcctgacggttcacggggaagagatggacggccacttggccgggctcgggcagcttgcccaaacgcgtgacgagtgcgtcacggtcggactgggtcacgtcgccttcacgaatgtcagtaagcacggtcagaagctcaccggtgtcttgacgatgctgctcggtgaggtagcagatcaccgggttgagttcctgccacaccagcgattcggtgataaagccttccggattaagaccggcacgggcataccgttcacggctggcgatgaattccggtgtgggttcgatgaggtcgcggttgcggccggataccgagaccggaggcagctgaaacaaatctccggacagcacgacctggatgccgccgaatggccgtggatcgcgacggacctcgcggcagacttggtcaaccatgtcaaacagccaggcgtgcagcatggagacctcgtcaatgacgagaatatccgtggcctgaatcttgcgtttgcggcgggatttgatgagcttgagcagactggaggtcagacttgtcgccacacccacaccactccatgagtgaatggtctggccattgatatgcgtggaggctatgcctgtggacgcagtgacggccacgctcgccccgtcggcacgcgcctgccggatgaactcgttgagcacgtaggtcttaccggcaccgggcgcaccggtcaggaacacgttcgcgccggcgttcagaatggccagggcttcggtttggcgcatatcaacctctctaggctccactctttgagcggagctgactgaggggagtcgtacgcatccgtgactcccctcagtctcacttcgttcgacagctcccctcagagaggggagccaagtacggcggactacttattgaggatgctggtggagacgatgtcggcagagatggccttggctgcggcctcgtccgggccgggggccggagccatgaaggccttgcggtagtaacgcagctcatccaaagattcgatgatgtcggcgagagcacggtgaccgccattcttcggcgggcggttctcgtagacggccgggtaccagcggcgggcgagctccttcagggtgctcacgtccacgctgcggtagtgcaggtgactcatgaggtccggcatatagtggtcgaggaacttcttgtcggatccaatggtgttgccggccagcagcgggcgcacgccttccggcgtgaagcgcagcacgtattcggtgaccttctgctcggcctcggccaggctcaggccattctcccactcgttgatcaggccggaacgggtgtgcatctggcgcacgaaatcgttcatgtggttcacggccttctcggacggcttgatgacgtaatccacgccctcgtccagcacattcaggtcaaagtcggtgggaaccacggacacctcgacgagttcgtcgccgccgaagatgtcaagtccggtcatctcgcaatcgatccaaatcaggcgcgagtccttcgcgctgtacgtttccgcgtcatggctgtcgaccatggtgtgcctcttttcttcgctggtcatcgcttatgcagaacagttcagactataccccagcgcatacaagctatctcgagccacatacgcgaaaagggcctgcataagcagacccttttcacaaggaatcaacccctaactagcgcaagctagcgggcatcaaccgatcagttgttgtggaagccggagtagttcggtgcttccgcggtcatcacgatgtcgtgcgggtgcgattcacgcaggccggcgtcggtgatgcggatgaacttgccacgttccggcatttcggcgatgttgtgtgcgccaatgtagaacatggactggtgcaggccgccgagcatctggtagagcacagcgttgagcgggccgcggtacggcacttcgccttccacaccttccggcacgaccttgtcgctggaggtcacatcggcctggaagtagcggtccttggagtaggacttcttgccgcgcggagccatggcgccaagggagcccatgccacggtacagcttgtactgtttgccgtgcaggagcaccttctcgcccggggcttcctcacagccagcgagcgtgccgccgagcatcacggaggaggcgccagccacaagggccttggcgatgtcaccggagtagtggataccaccgtcggcgatgcagggcacgccagcggcacggcaggcctgggcggcctcgtacacggcggtgagctgcggaacgccaacaccggcgacgatacgggtggtgcagatggaaccaggaccaataccgaccttgacggcatcggcaccggcctcgatcatggcctgggcaccggaacgggtgccgacgttgccgccgatgatctgcacgccatcgaaggcggaatcgtgcttcaggcgggagatcatgtcgagtgccaggcgggcctcaccgttggcggtgtcgaccacgagcacatccacgccggcctccatcagggcggaggcacgctgccatgcgtcgccgaggaagccgacgccggcggccacgcgcaggcgaccctgctcgtccttggtggcgtccgggtactgttcggtcttgacgaagtccttgaccgtgatcagaccagtcagatgaccttccgcatcaaccagcggcagcttctcaaccttgtgctgggcgagcaggcggtgggcgtcgtccttggagatgttggacggaccggtgaccaggttctccttggtcatgacatccttgaccttcagggtgtcgtaatcctcggaggcgatgaaacgcatatcacggttggtgatgatgccgacgagcttgttgtccttgtccaccaccggcagaccggagatgtggaacttgccgcacagcttgtcgagatcagccaaagtgacctcagggttgacggtcagcggatcggtaatcataccggactcggagcgcttgaccacatcgacctgagcagcctgatcgtcgatggacaggttgcggtgcagcacgccgataccaccgttacgagccatggcgatggccatctcggactcggtcacggtatccatggcggcggagagcaccggggccttcatcgtgatattgcgggtcagatgggtgctggtgtccacttcggaaggaatgacatccgtctcgttcggcagcagcaacacatcatcataggcaaggccgagcttggcgaaaatcgggggaaggggggcatacgccgactgggcgtttaattcatcaaggtttgtagccatgtaaacactatatgaaaatgcgctgaccttcacgacacacgtgtgagaaccgtccaatcacatatggctcaacgcgtgcggactgctatcaggaagggttttcctgtccgctcgaatcagcgccggtaaccggcagcgattcgcttccggaacgcgtagtttctggggttacgtcgtcatgcactgccgtggcatgctgcgcgttgtggcgcgccgcttccaacgtagcgttctcttcctgtatctccggaatacgatgcttcagatacgggtacatggtggcgatggtcagtacgaccacggcaatcgccataccaaaggcaacgtgctgcgccttgaagaaaagaatggtcaacgacccaaacgcgatcaacgccgcccaaccccaaagaatcagcacggctccacgaaccgaatggccgatgcgcagcatgcgatgatgcaggtgcatacggtccggatgcatcggcgactgccccttggccagacgccgcacaatcgccaggcacatgtcgagcaccggcaggaacagcaccagaatcggcaacagaatcggcatgaataccggcagatagatactggcgtgaatcgatgccggatcaagacggccggtcatgacgattgaggcgcaggtgatgagatagccgagcagcatcgagccggaatcacccatgaacaatttcgccggatgccagttatgcaggataaagcccacacagatgcccaccatcatcacgtcgatcagcgtggccagcgaggcgtaactgggcgagtatcgggcgatgatgtacgaatagatggcgaacgcgatgccgccgatggccacgatgcccgaagccagtccgtcaagaccgtccacgaaattgaccgcgttgatcgaagcgacaataaggaatgccgtaattgccatggacaggctcggggatgcggtgatcagagagcctcccagcggcagcgaaataatctgcaaaccaccccaggccacgaaaacggaaatcagcagctgaccggcgagcttcaacatccagtcaagatcccacaaatcatcggccatgcccagcagactgatcataatgccgccggcaagaatcacccacatctggtaattgccttggaacagacccgcaaggaacggcgttctgctggcaaagatggtggccacggtaaatccgatcagcatgccaaggccgcccatacgcggggtgggaatggtatgcacatcgcgggcgcgcacttcgccaaccgcgccgatctcgatggccacgtggcgaatcagcggagtcaccagccaggtgacgccacccgcgatggccgcgaccagtaagtaaatcctcatgcgcctaatcccccgccattgaggtggagggctttgcgaatcatggattggggaatgactccctcacgaagaatctcaatgccgtctctcgcatacggatccgctttcaccacggtgctagatatatggccttgtgtgggcccgccatccagatacaaatcaatctggtttccgaacgcttccacggcctcgtccacggtctgcgcgctttcatcgccggagcgattggcgcttgaagcggccagaggaccagtagcacgaagaatctcaaggcagagcgccgagttggggatgcgaatgccttgcgtgccgggtctgccttccgcggtgtcggccaacgtctccaacgtgcaatcgggacgcgcgacggcaatcggcgaaaacgcccccggcaggaaggcggcagaaagacggttcagcggcgaaggtagttcgagtccgagctcgtcaagttggtcagtggaatcaagcagaacctgcaatgccttgtatcggggacgccgcttgagttcgtagatgcgggcgatggcagccgcattgcgcggatcacaggctacgccatacacggtatcggtgggaatgacgatcagtccgccatcatgaatgatgcgtgcggcctgagccaacgactcatccgtgaccttccgcgttgcgctcataccgtctccgttcacctgattcatcacaatctatcattgcaccattgtgccccgacttgcacaacgacgatgaccgggtttcgttccgaacggcatgcaccgtcccgggcgaaacccggtcaccgtcaattcgaaagcaacctgtgccagaccatgcgtcacgcgccgaggtatgccttgcgcaccttctcgtcgtgcagcagatccgaggccttgccttccatcgtgatcttgccggtttcgagcacgtaggcgcgatcggcaatggatagggccatcttcgcgttctgttcgaccagcagcacggtgatgccgctcttgcgcagagtgacgatgatgtcgaaaatctccttgacaagcagaggcgaaagacccatcgacggctcatccatcagaatcgtcttcggatggctcatcagggcgcggcccatggccaccatctgctgctcaccgccggagagcgtgccggccagctggcggcgacgttccttcagacgcgggaagtagtcgaacaccatctcaagatccttgccgagattcgactggtccttgaggctgaacgcacccatctccaggttctcctgcacactcatgcgggtgaacacatggcggccttccggcacgtgggccatgcccagggtgacgatcttgttcgcatgcgtattaagcaggtcatgaccgtcataggtgatgctgccggacttggccggcaccagaccggtgatggtgtgcaaggtggtcgttttaccggcaccgttggctccgatcagggagacgatctcaccgtcgtccaccttcagactgatgcctttgaccgcgtcgatggcgccgtacgagacacacagatccttgatttccagcatcagcgtgccccctcttcttgaatcgtcttggcgacgcttggctccggctcgaccttggcggtcgagtcgccgtccgcatcatcattgctgtcgctacccagataggccgagatgacctgcgggttgttggcgatctgctccggcgtaccggatgcgatggtacgaccgtaatcaagcacctgaatgcgctggcaaacgctcatcaccaagctcatgtcatgttcgatgagcaggatggcgatgccgaaacgatcacggatcgtattgatgcagtgcagcagatcctcggtttccgtggggttcatgcctgcggccggctcgtcgagcaacagcagcttcatgccggtggccaaagcgcgcgcgatctccagcttgcgctgctggccgtatggcaggttggccgcttgcgtggccgccaagccttcgaggttgaaaatgcgcagcaggtcgatggccttctcatgcatctcatgctcctgcttccagaagcccggggtgcggaagatggcgccgcccatatggtaggagaacgattcgtcaaaggcgacgagcacattctcctcaacggtgagctgtttgaacaggcggatgttctggaaggttctggcgatgccggcacgaaccacctgataggtcttcttgccgttcatgtgttcgccatccagccagaaatcgccctcagtgggcttgtacacgccggtcagcaggttgaacaccgtggtcttgccggcaccgttggggccgatcagaccgacgagttcgcctttgttgatggtcatgttgaagtcggatacggccttcagaccaccgaaggtgatgccgagatgttcggctttgaggatgggctgggtatcgttgctcatcgtgcagcctccttctcggttgtatcggccggttcgttgacggctttatcggacttatcagcagccttgtcgttcttgccgtttccgcgaagcagcagccggttgatgagcttgggcagcgagaactcccatgaaccaaagatgccctgcgggcggaagatcatgacaagcaccagcaccaccgagtaggcgagcatacggtagtcagcgaaggcacgcagcagctcgggcaggatggtcaggccgatggcggagacgatcgagccggtgagcgaacccatgccgccgaacaccaccatgatcacgtagttgatggagttgagccagccggccatggtggggttcaacgaaccgatgtactgggcgaagatgccacctgcaatgcctgcaaagaatgcggaaatcgcgaagacaagcaccttgaggtacgtggtgttgagtccggaagcgcccgcagcgatctcgtcgtcgcgaatggccttgacggcgcgcccgtaacgggaacggccgaacatgaagagcacgaccacggtgaccaccatgatccagaacacgacgtacaggttggcggtgcgttcgatgccgatcagggcctgtcccgcggcacccttgtcaaggcccatgccgccggcaaccttgaggttttggatgatcacacgaatgatctcaccgaagcccagcgtgatgatggccaagtaatcgccatgcagtcgcagtgccgggataccaatcaggatgccgaacacacacgccacaatgccgccgatcagcgtggtaatcaggaaccttgcggtggggtcaacgccgatgccggccgcaaccatgtacttggatgccaatgcggctacataggcgccgatggcctcaaagccgcagcaacccagcgtcagttggccaagcacaccgatggtgaggttcagggacgtggtcatgatgatggcgatgcatgcggtcatcatgatgcccttgatataggaatcggccagaccggattcgcacagagccatcacgatgccgaacgtggcaaggatgcctaggaagcacaccacataggattgtgtggtggaaagcattgtcttcttcatacgatcagaccttctccccttcgttcttgcccataatgccggacggcttgacgagcagcacgatgatcaggatggcgaacacgatggcatcggagaatgccgaggtgatgaggcctccggtgacagtgccgatatatgccttggtcagactctcgatcaggccgatggcaagaccaccgatcatggcgcccgggatggagccgatgccaccaaggactgcggcgacgaatgccttcaagcccaacatggcacccatcataggcgacacctgcgggtaggcggcgcagtacatcagcgaggcgactgcagccagaccggaaccgatggcgaaggtcagggcgatggtggagttgacgttgacgcccatgagcacggcggcctccttgtcctcggagacggcgcgcatggccttgccctgcttggtgaacttgacgaacagctgcaggcccaccatgatgaccaggccgatgacgatggtcagcagtgtgtctccggaaagcttgagcttgccgaaggcaatggacggcaggtggaaaatggtcgggactgtctggaagtcggcaccgaagatggcctgagagccgttctccagcagcagggacatggcgatggcggtgatcagggcggtcatggaattgcccttctcgcgcaccggcttgtatgcggctttttcgacgatgacgccgacggccacgcacaccaggatggcgggaatgaccgccacccaggcgggcaggcccatggcgacgatggcgggaatggtgagcatcagcacatatgcgccgaccatgatgaaatcgccgtgggcgaagttgatcaggcggatgatgccgtagaccatggtgtagcccaatgccacaagcgcatacacgctaccgattttcaggccattgaatagctggctgacaaacatgatgatctgatccatcactgctccccctttctaaatctcattgtgtgttgaatgcgtttattgaatgtctgatgatgcgccatgaaaacacgaaagggagagggccgggaaaccggccactctcctatatcgcgcgctcatactagagcgcatggattggaatcatgcagcggtgattcacttgggctgcacggtggtgttgtagacaggcttgccgtccttcatctcaagcacgatgacggacttggtcggggagccggacttgtccatcgtgaacttaccggtcacaccgtcgaaggtcatgccggccacggcgttgcgcacatcctcacgggtggcgttcttgccggccttttcgatggcctgcttgatcatgtagatcgtgtcgtagcccagagcggcgaaagtgttcggctcggcgttgttcttggacttgtaggacttgatgaagtcctgcaccttggaattggtgttgtcgtcggcggagtagtgggtggtgtagtaggtcttgttgtactgggccttgtcaccggtgagcttgaggccgtcgtagccgtcagggcccatcacgtagccatcgaagcccacggaacgagcttgcgggatgatgtacggaccagccacggagtagtagtacggagcgtaaagcagctcagcaccggaggcctggatcttctgcagctgagcggagtactcggtgtcgtcggcggaggaggagctttccttgtccaccacttcaagaccaagcttctcggcggccttggcgaaagcctcacccacgccggaggagtacggatcaccggtaccgtagagcacggcgaccttcttgaccttcaggttctcggccgcgaagcgggcggcgacctcaccctggtaggagtccttgaagcaggtgcggaacaggtagttgccggtttcgatggaatcggaggtggcggccggggcgatggtgaccagcttggactggtcggccagcggagccacggctgcggtggtggcggagatggtcggaccggccacggcgagcacgttgttgtcgccaacaagcttgttgtaggcgttggacgcctcggtggcgtcgcccttgtcatccatggactcgagcttgaccttcttgccgttgatgccgcccttggcgttgatctcggaaacggccagctcgaagcccttgacctcggcctcgccgtaagcggcagcagtaccggagttggtggtcacggtgccgatggtgatggtatcaccggatgccttggcgctggagctggaggagtcatccatgctgccgccggagcatccagcaagggacaacgccataactgcggccgcgctggccgcaatgaacttagtggagaacttcacgttcatcctcttccttcttccttgggatattgcaacatcgttcatcagtcaatcaacgcgcgggatatgcgcgtgagacgttccgttcgcataattcacataccacagaactgcatcacacggcttgtggccgtcatctacgtctctctcattcgatgtttgtcgcggactgttataaccagacccgctttgaagccgcaataaattgttcttattatgagacagcgcaattacgggaacgagaatgcaagcccaaggaaatgtgggattcgtgaggcttaggaaaccgcaaacaggtagcggtcgcgacccgtccagtcctggccggtcgatgcggcagcgaatccggtggccctggcaaaggccacgagacgatccccctgggtcacgtcatgttccatgacaagcgcgcccccaggcttgagaagacggcaggcccgctcgataatgcgctcgggaatcaacgtaccgtccatcgagccgccatacaaagccaattccggatcccaatcacgcacttccggctgctcgggaatatcggtctgcggcacgtaggggggattggtgatgacgatatcgacggtgccgtccaattgggccaatgtggcgaaggacgtggcatccgcgatttccagatggtaattcgaggcaatggatgggtactttttcgcggtttccgacagattccttcgcgtccattcggcggtgttcggcgacagctccaccgcccacacctggctgccgggcacctcgctgacaacggacagcccaatcgcgccggagccggcgcacagatcgaccacacgaggatggatcatgccgtttcttgtcagccagtcaagaccggcctgcaccacggtttcagtttccggacgcggaatgaacacgccagggccgaccttcaggtcgagatagcggaacggcgcatgaccggtgatgtattgcagcggctcgcgcttggcacggcgggcaagcatggattggaagcgggcaagctgttcggctgtgccaagctcctcccccatcaacagagctttgtcgacatcgcgcaactcaacacctgccgcctcggcaaggagcagtttggcatcatgctcaggcgtctcaatgccagcctcacgcaattgcacggcggcatcacgaatcacatcggcagcagccatcacatccctatcttccggtgccttaattatcacataatgtaagggttcggccggtaaatgcgatgctcgaccgtaggcttgaccgaacggcctagagtgtgtcgagcattgtatctaccggccaaacccgctcacgctactatcacttctgattggccagacggtcggcttcgtcggcttggatgtcggagtcgattacggcctgcaggtcgccgtcaagcacggcatccaggttgtatgccttgtaattcgtacgatgatcgacgatgcggttctccgggaagttgtaggtacggatacgctcggagcgatccaacgagcgtacctgcgagtggcgcatatcagccgcctcagcggcctcctgctcgtgcttcatggccagtagtcgggacttcagcacgcgcagggcggaggcacggttctgaatctgcgacttctcgtcctgcatgttcaccgtgatgccggtaggcaggtgggtcatgcgcacggcggaatacgtggtgttcacggactgtccgccaggaccggagctcatgaagatatcaatcttcaggtctttcggatcaatctcaatttcgtcatcatcctcgtcggcttcggggaaaacaatcacaccggccgcagaagtctggatgcgcccctgcgattcggtgacaggaatgcgctgcacgcggtgcacgccgccctcgtatttcatcgaagaccacacgccgtcctcgggagcaggcgtgcccttggcccggatggcaatctgcacgtccttgacgccgccgagctcggtggtgttctcggactgaatgttcacgctccagccgcgcttctcggcgtagcgggtgtacatacgcagcaaatcaccggcaaacagtgcagcttcctcgccgccggtgccggccttgatttccataatggtgtctcgcgcatcatccggatcgcgcggaataagcgcggtgcgcagcttttcttccgcgcccggcagttcggattcgagacgcttagcttcctcggcgaagtcggcatcctcgccggccatctcctgagcggcttccaagtcatccttcaattgcaaccaagctttgtaggctcccacaatggcacctagctcggcatgacgacggcctagtttgcgcagcttgtccggattggacacgacttcggggctcgccatctgctcttcgatggactggtactcctcaagtgcggtcgccgccgcggggaactgttcgtctgccatgacacgctttctggttgtgttgtaatcaggtcaaaagaatacaaaaacgccagtcctcgggcgggcatgccgaagcatgccgggccgaataggactggcgtgaagtatgctacttgctcttcttgccgtagcgcttctcgaagcgagcaacgcggccaccggtgtcgagaatcttctgcttgccggtgtagaacgggtggcactgagagcacacgtcaacgaacatgtgatcttccttgccggcagtgcgggtcacgaaggtgttgccgcacgagcacgtcacctcaacggggtggtaatcaggatggataccctgctgcattttgcgtctcctatggattcgggggacccgggtcgtcatgcccctatggcagacgtgaaccggaaccttacggattatacgcgcctatatggacggggaatacgttgtgctgtcggaaaagagtggggccgcaggggcttgaaccctggaccgggcgattatgagtcgcatgctctaaccgactgagctacggccccacgatgacctaccgcgattgcagagtagtcaactcgccaaagtgtagcacgaccccggtcgcaggaacggataacaaacgaccactcccgtatgatgttgtacgcgccgcccaccctgatgcgcgagttcaacgtgcccagcagcaccgtgcaatggctgaccaccggattcatgctcaccaacggcatcatgattccggtcaccgcattcctcaccgagaccttcaccacacgccagctgtttctttacggcgatgggcatgttcttcgccggctcactcgcctgcgccctggcccccagtttcgcgctactgctcgcaggccgcatcatccaggcctgcggcgccggcgtgctcatgaccctgctgcagaccgtgctgttccgcgtctatccgcccgagcgccgcggacaggcgatgagcatgttcggcatggtcatcgcctttgctccggcactgggccccaccatctccggtctgctggtcgaatggctgagctggcgttggatgttcgcgctgctggtggcaatcgccggcggcgtgatcgcggccgcctgcttcacggtgcacaacgtgggcgagccgacccacccgcatatcgacgtgctgtccgtggtactttcgaccttcggtttcggcggtgtgctcttcggcttctccactgccggcggaaacggctggggcagcatggacgtgctggtatctctagccattggcgtaatcgccctgacactgttcatctggcgccagatgcggctggaacagccaatgcttgacttccgcattttccgcatggtggccatcgtgtgcatcatctgtctggtggcatccttcttcatccgagaccgcggtcttcatcccggtcagaagcgctgaaaacatgctccagggccgccagcacacaccgacggcccaagcccccccccaaaaaaaacagagactacaactcaggacggcagcctcgcgaaagccccatcaatcgcgcgcctgctcaatcagctgattcagtatgccggccttccgggcggcaaccgtctcctcccaatccagtccggtatccttggcccgtccgtagaagaatctgaccaaaccgggaaagtcgggccggtatccgctttggcggaaacttcgcgctatggcctcgcccgtcttgaggtcatctggccggtgagcctcatagataggaatcgcgcaaccctgccacttgcctcgcacacgggcaatgcggttgacgattaggccgccacgtgcgccgtcatattctgcagcttgcgggcttgctaaatcataaacaccaccattaatgaggtcctcgaccgtcattatccccttcaccgcactggcatccttgagccaaaacatcgaggcgaaattggtgtcatcaatatcccggaaatcctgcagcttccgttcccccacctgcgggtcgacggcgtacatgtattccgccatagcccggaacggtgagatgccgttatctttgttatgcaccagctcgacgcgcatatccgagccttcatctccggtcagaccgatgtcgctgatcgagcaatcaaaggaaaaccaatcccaaaactgccactcgatcatccggagcagaccctcgggatgtggcttgaatgggttcaaactgacttcacggtaaaactcacgccgcgcctcggcatacacggcaagattgcattgcttgaacatatcaacgacatccttggtatccaggattgccggtgctccggaatcttcaacggcggcagtggcttcggtcatggtcgatccttccggttaagtgtggacggcaggccgcatcgcccgccgtgagacacactgtacggaagcctccgccccgccgcaacccgttgaaacaaacttgtggatatgtggaaatccaatgattccaagggatgccgattgtgcataaccatgccatcgataggtggataaccgccggttcgacgcacctcatgcacgaggttatccaccatccacaggctctacggcgtgtcatccacagtcgacgatcgaggcgtatccgacccttgccaaacacgctgacacttcgaacgacgcctgccaatacgacaagtggtctgccgccatgatgaggacgaccggccaccggttgcgacaaattcgtcagccggattcagtcagacagctagatgataatgccgttgcagtggtcgacctcatgttggatgatctgcgcggtccatccagtgaacgtggcgtgacgcgctcggaaacgacggtcttcgtaattgacctcgatacgacggtaacgcagcgtgcgtcgttcgccggccaaagacaggcatccttcctgggtatcgaaggcaccatccgaagcggtgattacgggattgagcatcactgtgacgcgaccgccaaggtcctcgtccacgaaggctatgatgcgcttgcccacgccgatcatattggcggccattcccacgcagcgcgaacggttggcctccaacgtgtccacgaggtcctgcatggctgcctcgtcgctaggctcggctggttcggacggcgtgcgcaggaacgagcgcgatgtcataatggggcgttgcatcaggcctcttcgtgccagtggggattctggccgaaggtgtagccttcgggattatccatcgcggcgatgtcggccatgtcctgctcatccagctcaaaggcggtcagatcgaggttctggcgctgacgctccgggttcaggaacttcgggatggccacatcgccatactgaagatgccaacgcagaatggtctgcaccacagaaataccgtgcttggcggcgatacgcttcaagtccggatcgcgcagcatctggttggcacggcccagcgggctccacgcctcagtgatgatgccatgcgcgttgtcgtaggccagctgttcgtgctgctggaagtacggatgcaactcgacctggttgacggcaggggtcacgcccgtatcgcgaataagcaaatcaatgtgaccgggcaggaagttgctaacgccgatatgcttgaccagcccacgttcacgggcttcgaccagcgcctcccatgcctcgacgaactgaccttggctcgggttcggccagtgaatcaggtagaggtcgatgtagtcgagtcccatgcggcacacgctctcctcgatggtgagcagcgcctcgtcatgggcgtggtggcgggcaggcagcttggaagtgacgatgatgtcttcacgcggcacaccggattcgcggatagcgcggcccaccacgccttcgttctcatagttgaaggcggaatcgatgagtcggtagccctgatgaatggcagacttgatggcgtccacaccggtcaggccgttaaccttataggtgccgaatccggtggcgggcagctcaaggccgtcgttggccttgcgaatcggagtgactggtggctcaagcatgatagtcctcctgcttctcctgtgatggaatatcgattccatcataaagccaaccgatacgcggcaggcgaactatttgatttcccgcaattccggcggacggcgagtggagaagcggaacatgagtgcggcgagaatcacgccaagcaccgccatgccggtgaacaccatcatgctttgcgggaaagcggtgaaataggagtcggcggcatccgccccattgttcacggcggcggccgaaaatccagaaatcagcgcgctggccacagcagtgtcgttggctgcgttgctgactgtgttgttggtcgcgttgttgctggcgttgctgactgtgttgctgcatcgttcataagatttgccctcccctccattcgttcgttttcggtgttgccgatgggctggccgccggttgtaccgattgttttccgattgttaccggttgttggcgtcctgctgcatgagtcgcaaggcttcggtcaaggtgcgtaccgtggtttcgcactggtccgaggtcaatccacccagcagttggctcaaatgcgcgtgatattcctccacatagatgtggcggatatctaagccgcgttcggcgagcgtaagcgtcaccgcgcggcggtcggtggcatcggcgtgtttgacgacgagcccgaggtcggccatttcgccgacgagcttggtgatgctcggcgtggtgacgccgaggaatgcgctgacatcgcccacgcgcgcggtgccggtatcttgcccgttcggttcgttgatatgccagacggcgtcgatcacgtggacatagcgcggcttcatgcctttcggcaatgccggtatcagttcggtgatggttttggctttccagcaggcgtctataagactgcgtacgtcatccaccggcagctggccgggcttggacttggtcgcggactcagtcgcggacttggtttcggtctgggattcggtcatcgctgacccaacctccatttagttaccaatagtcattacctttagcaagggtatgcgacctataggcaaacccaacgacccattcgctcacgttgggtttcgccattttcgggagaaaaacaacagtgcggtgattcccataacgagaatcaccgcactgtactgttcgcgattgtttacgcgttgctatctgcgtcgtgcgcgttatcgacgcaccgccatctgggtcaccgcaagaccggacgccttgcggtcggctgcgtcagcgaagagccaaattggcggcaccgatgaggccggcgtcctggcccgcgactgcggcgacgatcttggcgtggccacggtaggcgctgccttccaggaaacgctggtagttgtagcgggccggctccaacagaatatcgcccacggccactacgccgccgccgatcacgaacaggtccggatcaagcacggcggaaacggcggccatggtgcggccaagccattcgccgatcttgccgaacgcatacaggccaagtacgtcaccttcctgagccgcttgggacaccatcgggccctccaacttagcgatatccccgccgcacaattccagaagacgcttggcgtcctgaggacgacggcgcacggcggacttggcgaagttctccaacgacgtgcccgaagtgtaacgttcggcgcagccgcgcagaccacaaccgcaatggtctccgtccgggaccatgggcaggtggccgagctctgcggccataccgaaggagccgcggtagagctggccgttgaccacgatggcaccgccaagaccggtgcccacggtcagcgcgaccatattggagctgccccgaccggcaccgtgcacgaattcgccccagccggcgcagttggcatcgttctcgacgacgaccggaacggcatggtcgatcaacgcaccgacgtgctcagacagattgtaattgatccaggccggaatgttggcggagaaggtgagcgtcttgcgatccgcgctcacattaccggccgcggagatgccgatggcctcgatatcggtgtggccggcggcgatggcttcgcggtagatctcggcgatgtgcttgttgatggcgtcggcgtccatcggcgtggggacgcgccaacgctggatgatgctgtcgtttgcatcgcagacggcagcggcgatcttggttccgccgatatcgatggcgagcgtggtcatggcttactccttgaagactttcgtaacgtacgagatagcgaaaatagtagtgagccgccatgacctcccaccgcggattttccgtggttcgtcatacgtcgcaaacattccgccgatgcgcttcctcatgcatttcacccgttgcaaacgggcgcctcccttaacgccggcatcggtgcggacggcgtgtcgaatcggatgcattcactttcaccgtccttgcggacggcatcgaagaacggcaggaaacaaaaaactcccgacatgcatcgggagtttggtggcgaccccggccggacttgaaccggtgacctccgccgtgacagggcggcgctctaaccaactgagctacggggccgtgcgtgcctcgatgaggcacaaaaggatatgctacagcatcatcggatcatgacacgccgtctgatacgtcgttccttccaccggcgaaccgaccgcaggtacggtggacggtatgtgaaccatatcgttcgaccgcgcacggccgcactccccataagacagtagccgtcatgcgtcaacgcacgttgcgcgacgacgcggcacgacgcacggccaccgaggccagtaaaccgatgaacagcatgatgccggcgaccagaagcgtccactgacctccttcgatgaatcctgaagtcatcgcatcggcaatcttcggcgcctcgtcgccgaaccgggccgccggtccatcaccgctgcggaacacgccgatcactccacccgccgaaccgctgaccgcctgggccagaccgtcgccgaccttggcgggcagcccgagggattcgagccgcgccggcaatgttccgttgacggccatggccaacgacgcgccggagatggccgaaccgacggcggtgccgagctgtcgaaccgtggactgggtggccgacccttcgccggactgcatgatcggcacttcggagagcaccacgctggtcagctgcgcggaggcgaagcccagacccagaccgtatgcggccatgggaataagctgccaccacaccgacaatcccacaggcataaggaccgcgaccagggcgacggcgatgatctcgatcacaagaccgagttgaatcacgccggccggggtgagcttggcggccatgacatgggcctgcgcacctgcgacgatggaccccagacccatcacggccagcatcgcaccggcctgcagcgtgttgagcccacgggcgttgatgaggtacagcggcagcatgaacaccagcgcgaattcgccggcggcgatggccgcagccgccagattgccccacgagaacgtcctgatgcgaaacagggtcatgtccagcatgaccggccgaccggctttgccccgcgctgactcgaagacgatgaaggcagtcatcagaagcgcaccggcgatcaggcagatcggcaccggcgacaaccagtctcgattccagctcaacccgcccagcttcaactgcgttgaggtctgcttccaccagccgtaggtctcgccttcaataagaccgaacaccagcagggccgaagtcagagcagacagcaccacgcccggaatatccacaccgacacgatgggatcgggcatcccgtgcggcatccgcggcgccggcgaccgaggcgttcccaccggtttgcggcaccaggaagacggccgacacgaagaccgcgatacccagcggcaagttcaccaggaaaatccaacgccatcccagagtctcggtgaacacgccaccgagcagcgggccgagggcggcggccgaactcatcaccgcaccccagacgccgaacgccgcggcacggtatctgccgcggaacagggcggacaccgtggacagggtgttcggcatgatcatcgcgcctccgatgccctgcagcacacgggcggcaagcagcatccccgcaccctgcgaggcggcggcgagcgtcgaactcgccacgaagatcacggtgccgacttgaaacaccagtttgcgtcccctggcgtcgcccaacttgccgaaaggcagcaacaacgcggcaagcacgatgttgtagagcgaggtgacccactgggcgtcggtcaggttaatgccgatatcatcgatgatggtggggatggagacgttgacgatcgagctgtcgagcacgatcatggccaaacccagggccatcacccacagcgcgccccacggcggcgtctgggcaggcagtggcgacgaggccgtcggattcgttgaagatgtcatagttgtcgaagttttcgaagttgtcgaagatgtcggggacgcatcgacttgagtctgacgttgggatcgtgatgaacagtccataacggggtttcctctcattgccatgatcgcggcgcctgatgcgcttatccgccgttcacagtacatccgtggcgcggaccgtctcaccggatatcaaggaacattccaggcgttcagccatgggcgtaacctcggcggatcgccgcaacggcaccatcggggacggccgcgtcatgccggatcgcgccaggccgcaatccgttcgacgggcgcaacccatccgacggcaacggcaacgggatcatggcggagccagggacggaatcatccggcaaagcaaaactacgttctcgcattggcgaaatcttcctcgacggaagtggcggctgacatcgacgcggatgcacgatgcgtgcgcgcgatgcgcaactgtgcttcgtcgagggtctccaaccaacgcattgtaggcctccgtcagctacgcgttcgccaaggaggcagtcgtctatcacaaggccgaccacaagatgcggcgaccggcgcacgttcaaacagaattatccgaagatattgcgacgcaaactcgccacatgatcaaactgccaccaaatgtacttacaggagattcaccgttgcggcatgacgatgggatatgggataatccacaaggtgcttttgcgtaggaccatgtcccttatccggcagaaacatgactagttcgcagaaacggatgcagacgaaccatgttggcaccatgagattcaatgactccgggtatgaccgccgactccaagtcatcggggctcagccttagcatcaacgcacgttattcgacgcgataatccagaaacgccgcaagcgcggtgacggcgatggcgatcgccgcaagcgtgaacgccgacattcggaacgacacggtaacgaaagtcgacatagcggttcccgagaccagagccaggacatacaccaccaagaacaccgcatcgcgactgctgaatttgcgatgggttttcaccatgtcgaagctatggcgcgagatgtacccgaccaagcccaccgccgccacggcgtatattgcaaaggcgataagcatcccgacacgaaccgtgacgtacggcagcatgccgctcctccatccatcgatgacgccgattatcaacagcagccaactcatcatcgccacgaatccgaacgccgaattcatccaacccagcgtccgcagccagaaggacgctggcgcgatggccgacacgatgtcgtcgcagaacgcgcggtagtcgcggccgatgacatccttcgcagtccacccgcgacggcggccgtcgatgagcatgtcgatgatgtcgcgacgcacctcctgccgctgcatgtcggtcaggctcgtggactccaagtagcactcgatgtcggtcattgtgtcgaaatccaccggatcgatgcgatattccatcttattattgatctttcgcaaacggcgggatgccctgctcatgacgacgctcctttgctttgctcggacttctttgcgccattgcctgcgcctccgacggcgaacaggttccgcaccgcggcggacagcatgccgaattcatcgcggaagcccgcgagttcatccagtccctgcttggtgatggcgtagtacttgcgcttcggccccagctccgaggcacgataggtggcagtgacgcaaccgcttttctccaaccgcagcagcaccggatagatcgtcccttcggcgacatcgccgaaaccatatccgttcagccgttgcgaaatctcgtacccgtaggtttcgccctgcgcgatgacggcaagcacgcaacccgcgatgacgcctttcagcatctgcgttgggattcttccttgcctcacctcttcctccttccgcgattccaccattgcgcccagcacaactatcttgcataccaagataccatacgctactttgcaatgcaagatagaggcggtcagcgacccggctcattgaaacataagaaatatattgcacatcctcgcaatagcgaaatatattgcactacatgggaactggtgataaattgttcacatgattgtcgattcaacgaggggatacgcgcgactcgtcaaacagcgccgccgcgcactcggcctgagccaagggacgttcgcggcgaaacttggagtatcaaggcgctggctcatcgacttcgagaacgacaaggttcccaatcccggtttcgccacaatcttgagggcattgcacctgcttggcctctccctcgacgtgcggcaaagcgtgtccatcgaccaactcgccgacgaattcgtcacaggcaaggatggacagctatgaccttccaagacactcttttcgcctttctttctgacacttatgtgggcaggttctatcgttcaagcaggggaaccgtctcgttcgcctatgacgacgattatcgctggtcggccaatccgaccccattgtccttggacatgccattagaggaggagagtttcgacgacgaacgtcccgccatcttcctcgaagcgctgattcccgaatcccctgcggcccgggccaatgcggcaagactgcatcatgcggcttcaaccggtgcctttgatctgctcacagccatcgggctggattcgacgggcgcgctgcgtctgaccaccacgccccagccaccgaacgaactctacgacctcataccgctcgacgacgccgccatcgcactgcgccttcggcaggccgcgccaaccggtgagcaatcctccgacgaggacgagcactggtccgtcgccggtcagcaaggcaaaaccgccctgctgctccagaacggacaatggttcgccgcatcgggcaacgcgctgaccacgcatatcctcaagcccggcatcccctcattgcccgaccaagccttcgacgagcacttcaccatgcgcatcgcccatttcctagggctgcgcgtcgcagaaaccgaattcaggttcttcgacggagagccggcgattgtgtccacgcgcttcgaccgcatacagaatgccgacggaaccgtgcgcgcactgcatcaaatcgacttcacgcaagccctcggcgtcggcgcagaccaaaaatacgaggagcacggcggaccgagatccgaggcctatgcagagatgctgcgagcgcatgacatccatcacgaggctgattccaacgtccgtatcttcgcggatggcatgctcgccagctatctactgggagcgaccgacagccatgccaagaattattcgctgatgctccaagattcgcacgtcgccatggcgccgatctacgacttcgcttccgttttcccctatctcgcatcgggaacgcagcgatacgcttccaccttggccatgaccatcggcgggcaacgcaaactcctgcaattgcgcgagaagcatctcctccgcttcgccgaccgcatgaaactgcccagagaatatgtcatcaaccgattcacgggcttggtgaaaaccttgcccgacgcgttcgatcaagccacggaggagaaccggcaaacctttgccctgttgaaggacaagaacttcctcgagcatttccaacaacgcctggccatgacgatcgacgatgcaaagacatggatcaacatgtgacgaaatccgtttccgccactccaccccgtcacgtcggtttgcctatgcccaccgttgcggcatgacgatgggatatgggataatccacaaggtgcttttgcgtggacagacaccaggatgacacgggaaaacaaacggcggatgacacaaaacgggccgtccgggacaccccgtagacggttgtgtcattttgatttgtgtcattacggagtccagatcccgcaaaacgttggaaaatcaactttttctaagtagttaggtattatatggctgaatttgtgtttcagatgatcaaggcccgtaaatcctacggcgaccgagtgatcctcgatgacgtgaccctgagcttcctgcccggcgcgaagatcggcgtcgtgggcccgaacggcatgggcaagtccaccctgctcaagatcatggccggcctcgagaccgtgagcaacggtgaggccacgctgaccccgggcttcacagtcggcatcctacagcaggagccgccgctggatgacaccaagaccgtgggcgagaacatcaagatggcgttcggcccaatcgccgagaaggtcgcccgcttcaacgctatcggcgaggaaatggccaacccggacgccgactttgacgcgctaatggaagagatgggcaagctgcagaccgaaatcgacgccgccgacggttgggatctcgactcccagctcgagcaggcgatggacgctctgcagtgcccggacccggataccccagtgaacgtgtgctccggtggcgagcgccgccgtgtggctctgtgcaagctgctgctcgaggctccagacctgctgctgctcgacgagcccaccaaccacctggatgccgaatccatcctgtggctggagcagttcctgcaccagtacaagggtgccgtcattgccgtcacccacgatcgttacttcatggacaacgtggccgagtggatctgcgaggtcgaccgcggccacctgtacccgtacaagggtaactactccacgtacctcgagaccaaggccaagcgtcttgagattcagggcgccaaggatgccaagctggccaagcgcctgaagaacgagctcgactgggtgcgctcctcccccaaggcccgtcaggccaagaacaaggcacgtctggaacgctacgaccagatggagaatgaggcacgcaacaacaagaagctcgacttctccgagatccagatcccggccggcccgcgcctcggttccaccgtgcttgaagccaaccacatccataaggccttcggcgagcgcgtgctcatcgacgacctgtccttcacgctgccgcgcaacggcatcgtcggcgtgatcggcccgaacggcgtgggcaagtccacgttgttcaagaccatcgtggggctcgagccgctcaccagcggcgagctgaagatcggcgacaccgtcaagatcagctacgtggatcagaaccgcgagggtctggatccgaacaagaacctgtgggaagccgtgtccggcggcctcgacttcatcgaggtggccggcgtggaagtgccgacccgcgcctacgtggccagcttcggcttcaagggcgccgaccagcagaagctgaccggcgtgctctccggtggtgagcgcaaccgtctgaacctggccctgaccctgaagcagggtggcaacctgctgctgctcgacgagcccaccaacgatttggacgtcgagactttggaatccctcgaaaacgcactgctcgaattcccgggctgcgccgtggtgatctcccacgaccgttggttcctcgaccgcgttgccacgcacatcctcgcgtgggagggcgatgacgacaatccggccaagtggtactggttcgaaggcaacttccagtcctaccaggagaacaaggtggctcgcctcggcgaggacgcggcccgcccgcaccgtctgcacaagaagctcgtgcgcggctaagcccacagctaacctgagaacaaggcatattgcctgtattcgtcgaaaaccgtcccgaaaggggcggttttcctatagctgtgcataaccggccgtttaccttccaaacaggctcgttacatttcgctcccgaaactcttaaccctcgccggatagactgccaaccatacgttggaataataaaaaccgaatatcgaacaggaatcgaggaacactatggctcaggcaaccgccgtcactccgctggatcatctagtgaaagtgttgaagttgggtgagccttccgcttaccgcaatcacacctatatcaacggcgaaagcatgtacttccccaccggccgcgtttacggtggccaggtcatcgcccagtcggtggtcgccgcatccaaaaccgtcaacgcatcgcgcctgccacactcggtgcatggctatttcatcgccgccggcgatattcggcaagatctgctgttcgatgtggagaacctgcgcgacggccgctcgttctcggctcgccgtgtcaatgtcacccaagccgaaggaccgattttgactgctatcgcctccttccaggaaaccgatcaggaaggcgtggagttcgccgatccgatgcctgaagacctacctgatcctgaaatgctgacctccgccaaggagcttatgcaaccgttcgccgaaaagtcgccgttcgccaattactacgccgaaaagtcgccatttgatattcgccacgtgacacccaccgtgatgctgcgagccgataaggattccgctgagcatgattccggcaagcagatggtgtggatgaaggccgacggccatgtcgatgtgtcgcaggtcatgcaccgcgcgatgctggcactcggatgcgatcaggtaatgatggaaccggtgctgcgccgagccgggctgtcgatttccacaccgggcatctcgtacgcttccatcgaccactcgatgtggtggtatcgcgatatcgacatcaacgaatggcatctgtatgtgcaggacaccccgatcgccgcgcacggtcgcggcctcggcatagccaaggtgtatgcgcaatccggcgaactggtggcggccattgcccaggaggccatggtgcgcgtgccgcaggaatagcggcatcggctcggccccatcagagggggtttagtaaggattaccgcttgtaggcctgggccatgtcgcggcgacgcttggcctctttgatcttgggattctccggaccttcgttcggcggtagctggcacagccattcgccgatgatgccgataaccatatcggcaatgcacaccactgcggcgaccgcgcattcagtgacggcctgtgcgtagaactccgcctcgatatggctcaggctcatcagaatctggccgccataccagccggcgagcgtcgccccggccaaacccaacgctttggccagcaccaacgtgtatacggcgatggtggggttgatgaagctatgcggccgcttcttgggatcggtgttcgcgtatttgtgcacctgcagggccatgaccagcacgatgatgcccagtacggccaataatccggtcacgatccatggcgcgccgatcagcgacagccccgagctttcgccataggaggccaggccgatacctgccaacaggccgagtccggcaccgatcacatactgccaccacggtgtacgccgtgttttcatgactggtctccttaccttacgttctacgcccacactaccggttgaacatgattcttgctctcagcgtgattacgccgagcaacgtgcgcctggcttactgcggcggcagcacccagttgtcggacagcaacccgacctggccggcatccggcgccatggccagcaggaaggacaccggatcgccgcccagagtggcatctggatccatatccaaccaaggcgccaataccgacgcatggttacgtgcggacggccacgggacgctgcagttcggctcatccgaggtcacgccctccatgtccaccagatcgaggtccaccgtcagctcgtgagcggcctcgatgctgcccaatacggcgatcaggtcggcggcgggcagtttggtttcgatctggacgaccgcactcattgcatccgggccgtcgaaacgactgacatggtacagcggggagatgccttggacctgattgccgggaatgctgtcgatggacacgatggcctcccggaaaagccgttccgcatcatgcgaagtggaatcaagcgagataatcgccttgcgcgaaacgggttgcgtctcgacggcctcatctgattccgctgctcccgctggcgggagctgactcgcggagcgggactgagggtggttttctacggctgaccacccccagtcagcatgcggctgacggctcccgccggcggggactgaggtatcggaatccgcatatccgctcagcatccagtcttcgctttccaattgcgcggcattgcgatctggcgccacggccagcaggctcgccactgggccgccatgggcaccagccagccgggcattggggttcaacgcggcccatggggccaagacgaatgcacgctgccaggcacgcggatggggcagggctaaatccggatcggcactggtgatgccgtcataatcgatgatgtcgaggtccaacggcctggaatcccaatgattctcacggacgcggccatgacgggcctcaatgccctgcaacgaggcaagaagctcatgactgcccattgtggtttccagctccaccacggcgttgagaaagtccggcgtgccgtcggccatgccccatgcggcggtacggtaaagcggtgatatgccggtcacctgagtgccaggcaacgcgtcgatttcccgcacggcggcacgcaatgtggtttccacttcgcccacgttgccgcctaacgccaccactgcattatgaatggtttgcggcggcacggcagcaccactgatggcattcggagcaagcacagatgattcgcccgtcaccgtcgatgaagcctcatccatgcgggcagctgccttgccggaatcgctacgagcccgggtgatggacaccgatacatccgcaaaagccacgacgatgggggcatgaggcttatgtacggtgacgtcgatgacttccacggccggagcgtcggcgaggattcggtcggcgatgagctgggcaagccgctcgatgagatccacatgttcgccctcgatgaccgagacgatgtccttggccatgcgcccgtaatcgatggtgtcttcgagatcgtcagattggccggcctgtcctaagtcaagatgcagcgtgacgtccaccacgaacgtctgcggtcgctcgtgttcgaaggcgagcacgccatgcgtgccgttggcatgtacgccggtgagtgtgatggtgtccattaatgcttgcttcctattatcgaaccttatatttgcgcagcgagagggagtgcgagccggcacacccctcagtcagcttccgccgacagttcccctcagagaggggagccgaggcgattaggcgtactggcgccaggtgttgccggtgatgacggcggcgcggcttttggccacatcgtgcacgcgtacggcccatgcgccatgttcggcactgagagcggagagcgctgcggtcacatcgtcgcgctggtccatggtcggcccgttttcgccggacgctccggcttcggcgagcatcgccgaaatgaaacgtttgcgggactgtccgatcagcaccggatatccggtagcgcggaaggtctcaagcccggtcagcaacggcagattatgttcgatgctgggcttggagaagcccagaccgggatcgatgacgatacgctcgggttttacaccggccgccagcacgtcatcgacctgacgcatgagctcgtcatggacgtcggtcagcacaccatgctcgtatacggaagtgtcctgatcggggttcacccccttggatccggcaagccagccacgccagtgctgcacgatatacaggcagtcatggtcggcaaccacatgaggcagattcgcgtccagcgtacctccggagacgtcattgatgatctgcgctcccccatccagagccgctgcggccacggacgcgcgggtggtgtcgatggacagcaccgcaccggccggaatcagcgcgttgacggcaccggtgatgcgggccagttcatcctcctcagacactcgcttggcaccgggacgcgtggattcggcgccgatgtcgatgatgtcggcgccggcggccatcatatcgcgaccatgttgtgcggccttggccgggtccaaccacaggccgccgtccgaggacgagtcctcggtgatattgagtacgcccatcaccatggtgtgcgatgcgtcgtgcaatgcttgcaaatcagtcattgtattccttttctgctcctgctggtgggagctgcccagccatgggctgactgagggtggtcgggctgtggtttaccacccccagtcggctgcgccgccagctcccgccagcaggcggccaatttattgatgaggtctctccctcagtcagccttacggctgccagctccctcatcagaaggagcttgtctccttcactatttatccagaatcaggctcatggcctcggctcgggtggcggggttgcgcagcaggccacgcaccgcggaggtcactgtacgggcggaggacttcttgatgccacgcatcgacatgcacaggtgctcgcattcggtcaccacaatcacgccacgcgcgcccgcatattcgaccagtgcatcggcgatctgctgggtcaagcgctcctgcacctgtggacggcgggcatacacctcgaccagtcgggccagcttgctcaagcccatcaccccatccttggccggaatatagcccacatgggccacgccgtggaacggcaacagatgatgctcgcataccgaatacagttcgatgtccttgaccagcaccagctcgtcggtatccacatcgaaatgcttctccagcacatcggccggcgaggcctgcaggccggcgaacagctcacggcaggcacgggcgatgcggtcgggtgtctccaccagtccctcgcgctcgggatcctcaccgatcgacttcaggaacaggcgtactgcctgacgcacgccttcttcgtcgtatgaggattcctcccgctggcgactttcggacccagaaccacccccagtcggctgcgccgccagcccccgccagcgggggcaagattctatatattcgttcatcttcatctctcccttgataccggctttacaacgacgtcggcccgatctggcatacggacgaaaccatatgccggatcgggccgaacagtcatcgaatcactcttccgtcttcataccgactgaacgcttgagactgtcgggaatctccaccggcggcttatcggagtcggggcggcgttcgttggacagccacaccggacggaccggagccttcttgatcggggcgaagatctccgcgagctccttctcgttgagcgtttccttgaccagcagctggcgaaccagttcgtcgaggatatcgcggttctcgttgatgatggtccacgcttcggtatgcgcggtttccacgagcttcaacacctcgtcatcaatcacctcggcggtgcgatcggagtacttacgcggctgcagaccgtccatcacggtggtctggtcatcgtcgtcgccccacttgatggcaccgagcttgtcggagaacccgtattcgatcaccatggtgcgggcgatgttcgtggccttctcgatatcgttcgaggcaccggtggttggatcgtggaacacgatctcctcagcagtacggccgcccatagcgtaggccatctggtcgagcaactggttgcgcgactgcgagtagcggtcggaagtgggcatcacggcggtgtagccgagtgcacggccgcgcggcagaatcgtcaccttggtcaccggatcggtgttgttcagggcggcggccaccagagcatggccaccctcgtggtatgcggtgttgcgcagctcttccagggccatgcccttggacttgcgcttcggaccggcctggacacgatcaatggcctcgtcaatggcacggttgtcgatgagctgggcaccggcgcgggcgcacagcagggcagcttcgttgagcacattggccaagtcggcaccagtgaagcccggggtacgcacggcgaccatgtgcaggtcgacatccggcacgaacggcttgcccttggcatgcaccttcaggatcgcctcacggccttccaaatcgggtgcggccacacctacctgacggtcgaatcgacccgggcgcagcagggcggggtcaagcacgtcgggacggttggtcgcggcgatgatgatgaggttagtgtcgttgtcgaaaccatccatctccacgagcagctgattcagcgtctgctcacgttcgtcatggccaccacccatgccggagccacgcttgcggcccacggcatcgatttcgtcgatgaagataatggcgggagcattcttcttggcctcgtcaaacaggtcacgcacacgggaggcaccgagtccgacgaacatctcgacgaagtcggaaccggccatcgagtagaacggcacgccggcctcacctgcgatggctcgggccagcagcgtcttaccggttccaggagggccatacagcagcacgccgcgcggaatgcgagcgcccaatgccttgtacttggacggatccttgaggaagtccttgatttcctccacctcggccacggcctcgtcctcgccggccacatcggcgaacttggtggtgggggtctgaccttcgagcagcttgccgctgttcttcttgccgcccatgccgagcatgccaccggcaccgcccatgcgactcatcaggaaccagaacaaggcgaagaagatgatgaacggcagaatagaggtgatgaggtagctcatcatgctggtctgctcgatgttggaggtccagcccttggacaaatcaccgttctccacggccttggccacctgagcgccctgcgcaaaggtgtagtagaactgaacgttcttgccgtagttggtcaccttgccggtgtccggatccttcttggaatagtcgttcttgagctcaagacggactacctgcttgttatccgtgatttcggcgtaggtggctttaccctggttcaacagcgcaaagccgtctttggtgtcgatggttttggtgccgctgccagcaaacatctggaacatcagcacgaccataatcaccagtaccgcgccccacaaccacggcgactgccagaccggcttgttctcattgccgttcttacggccattgttgtcgttgccgcggttgaacgggttgttgaatgggttgccgttgttgcggttattgttcgagttcgggttattcccgttgcccgaaccgggcccctgggggaaactcatgcttgcactccttggtaaacggacggcttgaggaccgcgatcgagtcgaggttgcggtagcgttcgtcgtaatcgagaccaaagccgaccacgaactcatccggaatctcatagccggcgtacttcacatccacgtccacctctcggcgggaaggcttgctcagcagagcaaacacctccacggaggcggcgccacgacgtttcagctcctcgaccagccacgcgagcgtgcgtcctgaatcaacaatatcctctacgatcacaatgtgccgtccgcgaacatctgcggacaaatcctgacgaaccgtaatctcaccactggatactgtgcccgaaccgtaactggacagactcatgaaatcaatctgcacagggatgctcatggcctggctgaactcgaccagcgtgttcacggcccccttcagcacggcaaccagcagtgggtccttgccacgataatcgtcacttacccgcgcggcgacctcatggattttggcatcgatctgttctctgctgaccagctcgtggtcaatatcttcctcaatgtcagcgattcgcatgggctccatcttggcacacgcgaatgacgtgtttctggcgctttgctgaatatccgctgggaagtgcgaccgccccctgaccatgccagtcgacgaccaggcgattgatggcctcgatttgcgcggaacttgcgctgataccagcccgggagagagcatgggcgatggctcgaagacggattgcctcatgtgccgattgcagcggtttgacggcaatgaccaagctgggttctcgctccagatcattcgacttgtccatcatgccggcagcggaggttccttgtgattccgccgttttcagggtgctgccaagggcttcgatcatggtcttatccgcctgttgatccagatactccttgtccagtctcgccaatcgtgcgccgttggcgatatgctgcgtcacatcggcaccggcgaaccgctcgatcgccggcaacaggtcatgccggatacgtgagcggagcgggtagtctcgcggcagctcgccatccacatcatcgccgttggtgggatcgtcccaataatgaatgttcaaatcctcgcagatgccggtggtttcggctcgagaaacgccgatcagcggtctgagaaacatgatgccgtcgcggtgcattacctgcggcataccggccagcgcatcaacgccgccactgcgcaacagcccgatcagcaccgtttccgcctggtcatccaatgtatgagccagcaacaccacagcggcattcagctcgcgtgccgcaccgcacaattccccataccgtgcctcacgggcggcagcctcgacgccttcgccctgcacatgcacgctggctgcacgaacagcaaccggggcaaggccacaatcgcggcatcgttcagcggtcaaagtcgccacccgatcggagcctgactgcaaaccatgatccacgatcaccgcaccgcaccgcaaaccaagactagcgcagacaattcggcaaaccgcggccagcgccatcgaatcacgtccacccgagcaggcgaccagcaccaaaggcgcgtcgggggccgcctggtgctcaccatgccgggcaaattcgggcgactgcatccctaatccggccgattccaatgccagccggacggcaccaatcgccttacgcaatcgagccgaatatgccatgcctcatcacccgccttaccgttaccgttcggccatcacagctcggccagcttagtgatgaatgcgctgatggcattgctcgcggcccagtaatccgcaggattgttaatcaccaccgcaaaagacaacgctcccccatgcgtacgggacacattgccggccatcgaggtgaccgtatccaaactaccggttttgacgcgaagcaagccggcgacatcatcactggtgtatcgcttccgcgccgaaccgaccagaccagcaaccgataatccttcggccgcaggggctccatcgccgaccgtcaggttacgctgctgcacggcggccaatgtgcgcacggtcagctgcgagccaggagacagacccgagcagtcggccatagtaagaccgttgatgtcgattttgaggttgccaagcactgtccgcaccgctttggtggcgccttccgggctgttgttctccgagcgtgccagtgcggtgagtctgccaaactcctcggccaaggtgttgtctgaatgacgcaacatgaacgccaggatttcggacaacgttgcggagctcaccgaagctatggggcttgcgccctgaggggcggcgtgtgccgccggctccgcctccacggtgatgccgtgctgttgcagcagaccggagaacgtcgcggcgacgtccgctgcagtgtgctgcgatagttcagggtatccggccgagtcatccgggttggcgggcgcgggcatgctgtcggaatattgacgcccgccatcgatggccatggatgataccgatgtgaaatacgtggtgtattcgccgagcacgccaccatcggcgttgcgcaggcccgtgggtatgcgggaatcgccgaataatgtgtcgtcgtagttgacgtgcaccgtggtgatgccgcgttgcgcaagggccgcagccgtggcctgcgcaagagtgttcagcccggcacggccgttaatatggtcggcatcggaatcgccggcagacagcagcatgtcgccattgcctttgagcgtcaccgtgtcgctgccggtatcagattgggtaagaaacacctgcgtgtccaacgtggcggccatgttcaacgtggatgatgccgcgagcgcggtaagcgtcttcatagtggacgcgggttcgcgcggcgtgcctgactcgtgctcggcggcgacagtgccccgggcatcctcgaccaccaccgaaacatcagagcccacgccttcagccgccagcagctcgttcatcacttcgcccgcagccgcggcgtcgatagtcttggtagtgtcaagggaaccggcgatggtgccgccttgcttggccgaaacggggtcagcgaaagtgggggcgtcgaccggtttgagggtgagcataccaggcatgacatcgtacacatctgcaatgcagtagcccgcgaatagcgcaatcgttatcagcacggagatgattacggtaatcgtgcgtcggacggatcggcgcgcgctatgattcaccgctccacgccgttggcgacgtgacatcgcagtggacgtcatcagactccctatctcacgggtcggttatttctgtagtgatgcgaatgaatcgagcgtgctcacgatcgacagtattcgcgcctccaacagcttaccgcccagccatgtcccaagcgccagaacaccgatgccgttggctaatgcgaccggaataatcaccagccagccggcgatccccgcatggatgacgagcagcacgatggcggcgatacccgtgggcagcatcagcagcatgctgccaagcatatagacgaacgggaagaagccctgagccattgctcggccttgcggcgaggagaacggcttgtccattgacgccacgggatacatgagcacacaggaggttatctcagccacaccaagaccgctgaagcccacacctaggcccacggcaaggaagaacaacccgatgatgagatcgtccggctgagcccagcgcccagcagtcacaccgactatcactacgcagcccacatacagcaatgccatgtagacgaccatgatgccgacatagactcgcactcggccgagcctatcggcccaaccacgcacaccagcgatgacctccatggtgaaaccgcggccatcgtaggcaagaccattgctttccacaatggacatgaaccatccgcaccaaatcatcgactgccagacgattgcgtgtataccgtgcgcctggaaggcaaagataattatgaacagcaccggcatggcgaagatcatgacctgacgtgggtcccgcttcaagtagatgagcacgcgtgcggaaatcgcgccggacgtggaatcgggcatccatgagaatgcgccgacgcctttcacggttgcgctctgcccagcgactccaaccgtcaggcgttcacgacgcaggcaccatgtgcacacaatgaagcacacaacccatgcaaccaccaatatggcgatgcgcgcgagcgctggcaaccatgcaccggacagcacatcgaacggcaattggaataccgcgccgaacggggtccatgccatgaccgccgcggcggcgctccatgcggatggatcaagcccgaacgcgatgccggaattaaccagaatattcggcagctggcaaatcaccacgaacaggagaacaatcacaatatagaatgtgcttttgcctcgtttgctggtcaccagtgtggtagataaggcgatcagcattttggaaatgctcatcattgtgatgacggcgagcggtgcggcaacgagctcggcgatcaccactgccgggcccatggcacggtaagccagcgaccagagcatcaaggaaatcacacctgtgatggcggggagcccggataagccagaaagcagcaggccgaattgcaaattgcgatctgcaataccgtagagtgcgaatttgcgcgggctcatggtggacccttcgcccaacatcatgagctgaatcaaaccgatgaatacggtgattgtcgcaccgaccagcacggcgaccatgttgacgatgccgcccggcccgagaatgttgaacggatagccgtccgagtccatggtggaaggcgggagcataccgacgaaccatgcgagtataccggtcccgataatggtgccagcggcgaatattgcggaaagaacgtaggcaaccgtctgccataccgatttgcgcagcgccgcgagggtgagcgcccaacgcagtcggaccagagtgattgcggtactcattaccgggcctcgttgtctgcattgtctgcattgtccgcattgcttgcgctactcgagccgccgacaatatcaggatgaggctgaactgtctcctgagtgaaggactgaagcggggttgattggacgagttgcgatgctgattgcgtggacgcaacaggctgcgctgccggctgattgggctgtactgccggctgaccatcatgcgatagaccaccatcgagccatgcgagatgtgccgcttcatggcgtccaccaaccaactgcaggaagcggtcttcaagctcttcgccggaggcaacctcgtccaccgtgccggccgcgcacaccatgccgttgttaatcacagccacatgcgtgcacatcttctcgaccagtgtcatcacatgcgaggaaatgataaccgtgccgccggtttgcgcatattcgaccaggatgtctttgaggttggcgctagataccgggtccacggactcgaacggctcatccaacaccagaatgcgtgggctgtgaatcatcgcggaggccaagcagattttcttggtcatgccggccgaataatcggtgaccatagtgttgacggcctgggccaaatcgaaagcattcaggaggtctttcgcgcggcgagtggtctcctcacggctcatgccgcgtagcatgccggagtagatgagcagctgcaggccggtgagacgatcgagtatctgatcgggttgcggcattacgccgatcatgcgtttggcggtgttgacatcgctccacacgtcgtggcccagaatcatggcggtgccagcgtccggcaccaacagaccggtcaccatgttaagcgtggtggtttttccggcaccgttcgggcctacaagcccatagaacgaaccaattgggatgtcgagcgcaagcccgttgactgcgatcttctggtcgaaacgtttaaataggccacgaatcgacaccgcggcagtcggattcggcggccatgcctgcggttgtggctgttgcggcatcatcggcggctgagcgggtgcgtctccagacctcatcgcagattgaaattcggcattcccctggatattgtctaagttcatacacccactctagtccttcagcagaacaaagcccccagtaaatcgatattttgccctattgacgaaccttcaatgaaacaaaaccacaagtcaatcaagcttttgctccgctgacaaactttcagtgaggtaattctgcgagccacccaagattttgccccgctgacagcctcccagcgaagcaaaatctccagtcaatcgatgtcttgccccactgacgagccctcaacgaagcaaaaccacgggttactagtcgaatcaccccgctgacggcctcccagcgaagcatattgccgaataactcgatgttttgccccgctgagacccaactagcgaagcaaaatctccagttagtcgacgccttgtcccactaacaggccctcaacaaaacaaaaccttgggcaattggttgatttgctccgctgaacctcatcagcctttatgcgcgatgggcttccactggaccttggcgaagatggcctggaatgaaatcggcacatagctcaacatgtaaatagggaagctcaacacgtaggcgagcaactccttgttggaggcaccaatctgatcgcgctcaacgatgatggtcaaggcggccagcgccatcagaccaagcaccgacgtgacgataccgttcgaccagccaagcaacgattgcagctggctcggccagctcacaaagccaaaggcggcaaacagcacacccataatgacgcgaatcacgcccagcacggtgaacgggcacaacatcaaagtgaaatcaatgcaggagaaatcgcgttctcgcaccgctcgcttgagcagggccggaccgtaatagcggaacacctgcaggaatcccttactccaacgcagtcgttgacgccagctctgcgcaaaggtgacaggctgctcgtcgtacagaattgcgttgccgcagtagccgatacggtcgccatgcagaatcgaatccatggtgaattcgagatcctcagtaagcagatggaacttccatccacgattgcgcttcatcacgtcacgggagaacatgaatccggtaccgcccacgtggcaagaggatcccagaatcatgcgcgagttggacaggaatcgcgattcacggatgaaccacaacgccgagccagaggaaacccagttatcagccaaattcaccgagttgcggtagctggtcaggatcctgaagcccgagcagaacgccttgttcatttcctcgaagtaatgcttgtcgagcttgttgtcggcatcgaacacaaagtaggcctcatagtcatctgccgcgccggtatcgagcatatggttcagcagataggtcaatgcatatcccttgccaaccagctcaaggttatgccgctcaatcacatggcatccacgggcacgcaccacttcagcggtgttgtcggtgcagttatccgccaccaaccagatatcaatgaggccggtgggataggtctgcgcctgaatcgagtcgatgagattgccgatgacgttctcctcgttgcgcgcggagatcagcacggcataacggttggtcatgggcgcgtcggggaaacgcacgggcttggcaaacagggacatcacaatgcacagtccctgatacaccatgcccgctccaccgacgatcaccaataggatgtcgagcacagtaagcaatgtcatcagcgccaccccgctctcgggttgtccgatacggacgtattgtctgacgatgattcaggttgtacagcatcggacgcggctgcctcatcatcagtggaagtgtgacgctgaggaatggcggaggtatacggctcatcgtcatcatcttccgcagcggtaccgcgcaatcccttgcgggcattggccgaaagcacacgcttcgggatagccaccgtggcggaatcttcgccatcgtcttcacttcccccgtgctccggaatcgcgtagatctgctcctgcagcaaacgcagttcctcgcccatcggcacccgactcgtcgaccccttggcagcacgcggcatatgctcgcccagtggctgcagcacatgctcgccgaaggcctcagatgcctcgacgatcttggacttcttctccggttcgggatcattcatcaatggcgaatcaatcaggtcataccgcttggtgtagacgcggaagatggcctgcagggaggcggtgaccggcaaggccaggaaagcaccgaacgcaccaaacagcgaaccgaaggccagcactgcgaggaaggcgaccgcggcattgatatccatggtgcgctgggaaattctcggagaaagaatcaggttctcaatctgctggtagacgatgatgaacaccagcacagccacggcatatgtccaaccgcgattgccccaagcgaacagcaccggcagcgcaccgccgatataggtgccgactgtggggatgaactgggagaccacaccgcagaagagcgccaggggcagccaatagggcacatgcagaatttccagaaaaatcgcggtgcatgcggcattgataagcgccaggatggaacgggaaaacaggaaggatgaaatctggccttgggccacagtccacaccagcaagaatcggcgctgcgtgctgggggccagccattggcagaaggaacggcgcagcttggggccggcggcggaaatgtagtacgtggtcatcaccacggtcatgagattcagcaagaaggagaacaggccacccacagtgctcatggcggtaccggcaaagtcggtaacccacgaagtctgaatgttgttgacgatttcagtgccaagattgttgatttccggcatcttaaacgtggcgtactgatcgacgaactcacgtatctgctcgtacatgcccggcagacctttgaccatggcgatcatctgctgcacgaacatgttgccgaacaaggtgaacagaacgctcaccaccacggccacacccaccaggctgaccatcgaggccacgccgcgtttccagccatgggccaccagcgccacaaccaacggttcgatggcgagcgccacgaacagcgagatgatgatgtccagcaccagataggagatgtcgccccatgagcgccagcagaacatgaacacgatgatggcgatggccacatagagcaacgcacgaccgaaccattccggaggccggcgcggatcgcccttagaagggaacagggtaccaaaatcgatacggttctcgtcttcaggactagctgcggtttcggcagtgcctacattatctgtgtttcgcgcgctttcgctcatggctccccattgtagcgagtgggtttgaagctcgagtcatccctgcggagtacacccgctttcctattgttgggaatatgctcaacgtttcgattatcatccccgcgtggaacgagtccgaacgcatcctcgattgtctgttgaacgccacacgccagactgttatgccgtatgaggtgctggtggtggataaccgatcaacggatgacacctgcgcaatcgtggagcggttcattgccgaacatcccgaggcgccggtcaaactgctgcaccagaacgacgagcaagggctgatttccacccgcaatttcggcctgaacgccgccaccggcgatgtgttgggacgttttgatgccgattgcatgattcgccccgattgggtggaggtggtttccgggattttcaccgaggatcccggggccatgggcgccaccggaccggtgatgtattacgatatgccctcacgccacttcggcctgaggagcgacaattccctgcgcaaacgcatgtacaaagccgacggcggccagccgctgctgttcggctcgaatatggctttgcgcgcttccgcttggcatcagatcgccaacgaggtgtgccgggacaaagccgacgtgatgcatgaggatatcgatatttcgctgcatctgctgggcaaggatttgaaaaccgtatattcgccgcgcatgattgccgcgatgagcgctcgacgcatggatacgtcgcccagttcgttcctgaactatatgcgtcgattcaagaacacgttcgatgcgcatccacagcattggcgcaagcataagccggaaattctcttcaccgccatgtatccagcaatgcatctgttctatccggtatggcagaaagtgctggacactgcagacatcaatccggctgaggcagcgtggatcaacgagcagatggaactggccgagaccgaaggcaagcagctctacgccgagacgcctactgacgaggtctatgacgagcgccacgagaaataagtgggcatatagcgttgccctcgctggcggggctgtcagcaaagctgactgggggtggctacgggaataccgcgaccacccccagtccgtctccgacggacagccccgccagcgggggcaacgctattcagcagatcacatcagcgaggtgtagatcttcaggatgtcctcttcggtggcctgacgcgggttgcccggcgtgcacacgtcgttgaaggcatcgtgggccagcggagccagatcggcctcggtggcaccgacctcggagatcgtggtcgggttcttcagatccacggtgagcttgtggacggcctgcacggcctcctcacgcaccttctccagatcgccagtgtaggcatcctcaacgccgaaggcatcggcgatgtcgcggtacttctcaccagtgaagtccttgttgtattccatgaccggagccagcagaataccgttggccacaccgtgggccacgcccagacgaccgcccagcgggtgggccatgccgtgcaccagaccaaggccgacgttggagtaagccataccggtgatgtaggaggcgtaggccatctgctcgccggccgggatatcgccatcggcggacttggccaggttcttggcaatcatgcggatggtctgcatggacaggcagtcagacaggctccaagcacccggggtgatgtagccctcgatggcgtgggtcagggcatccagaccggtggccaccttcaggccgcgcggcatggagtcggtcagatccgggtccacaaaagcgacaatcgggatgtcatgcgggtcgacggccacgaacttacgcttgttggcggtatcggtgaccacataattgatggtggtctcggaggcggtgccagcggtggtgggcacgccgaagatcgggacggacgggttcttggtgtcggccacgccctcgagggagagcacatcggcgaactccgggttggcggtgatgatgccgatgcccttgcaggtatcctgcggggaaccgccgcccagaccaatcaggaagtcggcgccggattcggcgaacttggccacgccatccttgatgcactcgaccggcgggttcggcttgacgttggagaacacctcatagggcaggccggcctcgtccaaaaccttggtgaccttctccgccgtgccggtctccaaaagcaccgggtcggtgacgatgaacgccttcgtgaagccatgctgcttggcaacagccggaatctccttgatggcgccgcgaccgaagtatgcagtctggttgaaaatcatgcgatagaccataagtgctctccttttgagctcgttcattaaccgatgagccactctgtcattgagcggttcaacggttccccagtgtactccgaatgttaacgttaacctgaaaacacgctgaaaaaacaatgctgaaaataatggcaaaaacggcgaaattccgcgcttattgagattctgtctcaataagtcgcagcgataagaaatgagggagtccggcatacggggcacacctgaccaattccatcagccgaacgcgaacggggtcatcagatgactcgctcaccgttttctacttcgagaagaggactaagatacgtcgcagttggggcgatcacaggtagtggaatgaggtagataatggcaaacggcaaggctatgacggtcggcgagatggcatccctatttctcgatcccgccacccctgttcgcatcgacgctttcgatggctctcatttcggaccggcagacgccgatctgaaagtcaacgtcgccaccccgaattgcatgtatcagctgctcgctcatccgaacgaaatcggtattgtgcgcgcgtatattctgggcgattttgacgtggaaggcatcgactatgccgatccgtaccctgccatgcgcaagctgatttccctgtccaagtacatcaagccgctcactcctgcttccatcgcccgcgtatccgcaggaatactcagccatggcttcaagaagccgccggtgccttccaccgagggaccgagcaagttcgcccgcattaagcgcggcctgatgccacataccgaaaaggccgattcggaaaccgtcagcttccattacgacatgtctaacgagttctatgccgacttcctaggtccgtccatgacctacacctgcgcggtgttcgacaacgagcatatgagccttgaagacgcacaggccaacaagctgcgcctgattctcgacaagctggatctgaagccaggcgaacgactgctcgatatcggctgcggatggggttcgatggtcatcaccgcagcccgccgcggcatcaaggcgctgggcgtcacgctgtccaaggaacaggccgcatacgccaacgagtggatcgcccgtgagggattgcaggatctggccgaggtacgcgtgcaggattatcgcgaggtgcctgagcatgacttcgatggcatctgctcaatcggcatgatggaacacgtgggcgtcaagaactaccaaagctacttcgaggagatgttccgcctgctgaagccgatgggccgcttggtgaaccaccagatcaccatcagccaggacaagccacacggcaagcccggcaccgacgaattcctcgatcgctacatcttcccggatggcgacctcggcgcgcccggcttcatcgaatcatgcattcatgacgccggtttcaacgtggtgcaccaggagaacctgcgtcagcattacgcgctcaccctgcatcactggaaccagaatctctccgagcactgggatgacgcggtcaagcaggtcggattcgagcgtgccaaggtgtggggcatgtatatggccgcctgcgccctgaacttcgagctcgacggcattcaaattcaccagttcctggccgccaagccagaccgtgtgggccacccggacggcaagtggtatccgttgcgccaatggtggcaggcctgacacccctcgcaacaacgaaaagccccgcatcatgcggggctttcctgtggtggctccgagcggcatcgatccgctgacctagcgattttcagtcgctcgctctaccaactgagctacagagccagtgaacagtcgaaagcccggacaaaaccgggcttcataaccattccagcgaccccggccggacttgaaccggtgacctccgccgtgacagggcggcgctctaaccaactgagctacggggccatgttgtttctgccatgcaacagacaacagatgtatatcttatatgaaattagcaacctcgcaaaccacggcgtgtttcgcgatattgcagcgtttccggcacttggcatattcgttgtgaatacctgtaatttcgcgacccgcactgaccggcaccgccgattgcagatatcctctaggtaactggcttgctatggtgagtgatgcaacatatcagcgacccaaatgaatagcaacaccatgagcgagacgcgcaacgttactccaggcagctccaaccattccgaggaacatatgacagacccgacaactacccccacgactgccggcgcggccaacgccaccaccgataatgcgagcgccacgcatccacacccattgcacaaagtgctctccttcgtgcgacgctccggaaggcttgacgaccgcctgcagcgcgcatgggacaactatgccgacacgtatctgctcgatatcaccactggcaatctgctggacgtacgcgaaggcgtgacgctcaaccgcaatttcgtcgcacagcattggggcaacgacaacccgctcattgtggaaatcggcaccggccagggcgagaatgtggtcgccgcagcggcggcccaccccgaaacgaacttcctggcgctcgaagtttacgaccccggcgtggcccacacgttgctgctggcgggcaagcaagggctgcccaacatccgagtggcacaggtcaacgcacctgaactgtttaaggtcaccgagcccggcactgtggctgaggtatggacgttcttccccgatccgtggcccaagaagaagcaccataaacgccgtatcgttcaggttggcatgtcggacgacatccaccgcgcactggtcgaaaacgggctgtggcgcattgccaccgatatcgaggattacgccttgcatgtgcacgaggtgatggatcatcttgatggctggactaacttgggaggcgtcaccgtcagtcttcctgtggagcacgtgggcaagggcaacgcagacatggccgccgatatgccgcacgctgacttcaaggaatccgaacggttcgagggccgtgtgctcaccaacttcgagaagaagggactggcagccggccgagtgattcacgatttcacgtatcaggcagtaccggtctcccgataagcgggcatctgcggcacgtccgacacacgggcgtgtcgcggatttgcataaacccgattccttcattaaagtagctcaagttgttcgcccccatcgtctaacggttaggacaccagactttcaatctgacaacgagagttcgactctctctgggggtaccgcatagaagagccttggaaacgttgagattccaaggctcttcgcatattcatcgtgctagacgccaccgttttgcaaggtttttgcaaggcgttctactcgttgctatcgccttcggtgtccaacgcctcgccgtattcgtccagatcggagtcgtacaggtcggcgtatgtctccatcgtctgcgcgaacgtatggtgtccggctatccgctgcactagtttcgggttgacaccggcatggatagccagactcaccgccgtatgccgtagatcatgcggggtcatgtagtcgggtacgccctcggtcttctcgatggacacggtgagccagccggtgcgactgtcgggatgacgcatgtagtcgtccttggtcagattggctggattggatacaatgcattagacagtccgatgagggacgaatgacatgagatctgagaccgacgatggccggcccgaaacatccccggataccggagcccgaaggaattcaccgaacaaggactcgtcctctaagaaactgtccaacacaccgttgccaatccatcgccgcccgcaggttcaggcacggaaacaacgccgccggccgccactccggcatgatgcaacccgtcgatgccgaggacgccgacgcggatgccgtcgaaaccgcggatccggttcccagcggacaatccgcggtctgaccgaagcgacagggaccgctctccgccgcgatgattcttccggccggacgacaatccgaccggaaccccgacggctctcttccttcttctctccccggcgggcatggcaacggccctgcgccaacggttcaaaccgttaacgcagggccgttccctcgctgctcggactatttactgcttgtcggtttcctcggaggcgagtcgttcttcgagctgttcgacgatgtggtcgtgcatgttctcgtcgatcttgacggccaggaggaagacgacgaggctggcgacgataccggcgagtggcaggtagtaggcgcaggtcttgaacgtgcggatgttcgcggcggtcatgtcggcggcggtggcgttaccgaccattccggcggcgacgaccacgaagcccacgatgccgttggacagggcgccagcgatcttgtcgagcatcgggcgcacggagagggtgacggcctcgttgcgcttgccggtcttgagctgtccgtattcgatggagtcggtcatgctcaggatggcggtcatctggatggtctgcgcgggaaggtagaagaggacgagcgcgacgatgacgacgggcaggttcatgggcgcgatgatgaacagcgtgtagccggcgatcatgagcgccatgccggcggtgtacagccagcggcgcggaatgctgcggttgagcaccgggtagaggggcgtggtgaccagtccggtgatgaccgggatgacgccggcgatggagaagctgtccggggcgccgagcacgtatttgaactggtagaagagcacgccggtggtggcgacgttggccacggagtacagcaggtagctgagggcgacccacaggagctggtcgttccgggcgatggccttgaacgcctcgatggggttgccgttggcctcggccttggcgcgcagctcgccctggttctctcgggtgccgaacgcgacgctccacgcggtgagcaagccgagcacggcgatgatgatggcgaacgccgcccagccggtgcggccctgctcccactggccggtgaacttccaggtgaaccagctgacgacgggcacgacgatgacggtgacgccgttgtagccgatggatccggtgaacgcgccgagcgcggtgtacgtgctgcgctcgtgcgagtcggaggaaatcgcggggatcatgccccagtacgagatgtcgcgcagcgagtagatcacgtcgagcaggatgaacacgatgacgaacaggaccatgaacacgccggtgttcacgtccacgaggccgaacaggccggtgaacaccatgatcagcaggatgccgggcacgatgccgccgatgaactgccagggacggaaccggccccatcgggtgttcgtgttgtccacgaggttgccgagcagcgggtcgaggaagatctccgcgatgcggatgaccactatgagtccggtgatcactgcgatgaggcgcgcggccagcgtcttgtccacatcgatgaacagcgcggtggtcacgaacgtgatgaagaacgtgctcatcgtgttgtagaacgcggcctgacccaggttgccgaatgcgtatgcgatcttctgccccatgtttcctgaaggcgtggcatgcggctgttccgacgtcgccatgcgctgtgtggtggatccgctcatggtgtggtggcctccttgcgacctataaagaatccgtgcgcgggaaccgctccaatcccgcaaagcggcagtatataactttcttgaaaaagtaaaaaactttaccgcgtgtcgcagatcatgccaacgttttgcaaccagcactccgtgtggatgagtaaggtttgaagaccgtttgatgtgcttggatcttaagaaatccacgtattttgcatgttgtaggccttatgccgcgagatgctggaaagaatttgcgcaatcaagtaaaaatatttatcctcattatataaggaacccgattcaacgaggttccctcactgcggcggcaacgacgcgacgcaatccgatgcgaaagcgaggacatcatgaacacaaccgacgatcagctgaagaacggcgatccgatcgtctcaccgtccatgccgacgacggcatggctcacggacccgcgcgtgtacgcggtccaccggctcgacgcccattccgatcatgcgtgctggtcgcacgcccccgtcaacggcgagggttctgatctcgggcagagccttgacggcgaatggcgggtccgcgtcgagacggcgccgacgggccgtttccccgatgggacgagcgacgggccggaccggatcagcaacgtgtcgcctctgttcgccgcgtccgacttcgacgattcgtcgttctcccgcgtgcaggtgccctcgcatctggagactgcggggctgcttgccccgcagtacgtgaacgtgcagtacccatgggacggacatgaggacccgaaggccccggccatccccgagcacggccatgtggcggtctaccggcgcgagttcgacgcggatggcgaagtcgcccaggccgtgcgcgagggacgcccggtgacgcttaccttccagggcgcagccacagccatctacgtgtggctcaacggctcgttcgttggctacgccgaggactccttcacgcccagcgagttcgacgtgacggacgcgatcaagatggaaggcaacgtgctggcggtcgcctgctacgagtattcgagcgcgagctggttggaggatcaggacttctggcggctgcacggcctgttccgctccgtcgaactcaacgcgaggccttcctcccatgtcgccgacatccacgccgacaccgattgggaccccgccacatctcgcggatcgctctcgctggacatactagtcgacggcacaccgaacgccgcgacggccgacctcgtgctgcgcgataagaacggcacgaccgtctggcacacctccaccgaagtgacaggaacactgcacgccgagaccgagatcgacgacgcgtcgccatggagcgcggaacgacccgacctgtacaccctgtccgtcgccctgctcgacgcggacggcaggatcctggaaatcgcgcgcacccgcatcggcttccgccgcgtgtccatcgaggacggcatcctcaagctcaacggcaagcgcctcgtgttccgcggcgtcaaccgccacgagttcgactgccggcgcggccgagccatcaccgaagaggacatgctgtgggacatccgcttcatgaagcgccacaacatcaacgcggtgcgcacctcgcactatccgaaccagtcacgctggtacgaactgtgcgacgaatacggcatctacctgatcgacgagaccaacctggaaacccacggcagctggaacagccccggcgacatccccgtgggaacctccgtccccggcgacgacgaagcctggctcggcgcatgcatcgaccgactcgacagcatgatcatgcgcgaccgcaaccatcccagcgtgctcatctggtcgctgggcaacgaatcctatgcgggcgaagtcctcaaggccatgagcgcgcacgcgcaccggcttgatccgggtcgtcccgtccactacgaaggcgtcaactggaaccacgcctacgacgagatcagcgatttcgagagccgtatgtacgccaagccggccgagatccgagactggctcgaacacggcgacgaacgaggcgaggcgagcaagccgttcgtcagctgcgagtacatgcatgccatgggcaactcatgcggcggcctgagcgagttcatcgacctcgaacggtacgagcgctactccggcggattcatctgggactacatcgaccaagggctcgtccagcgtctgcccgacggatgcgaacgcctcagcgtcggcggagactggggcgaccggccgaccgactacgaattcgtgggcaacggcatcgtattcgccgaccgcacccccagccccaaggcgcaggaggtcaagcagctgtattcgccagtcaagctcacccccgacgggcacggcgtgaccatcgagaaccgcaacctgttcgccagcaccgacggctatgtattcgccgcacggctcctcgaagacggacgcgagatttggcatgccgactaccgtttcgacgtggccgcaggagatacccaacaccatgacatcgccttcccggacatcgactccgacgagggcacgcgcgaggtcacctatgaggtcgatctcctgctcgcagaggccaccgcgtgggcacccgccggctacgaactcgccttcggacaactcaccgacaccctcaaccccgcaggggacatcaccgggaacgaccaagacgacggccgcgcgacggtcactctcagccgatggaacgccggcatccgccgcgacgacgaggaaatcctcatgtcacgcactcagggaggcatcgtctcctggaagcgcaacgggcgggaaatggtcatccgccgtcccgagatcgtcaccttccgtccgctgaccgacaacgaccgcggcaatcgctccggatacgaccgggccgcatggttcgcggccggccgctatgccgtcgtgaccgatacgagcatcacgcaatccgacgatggcggactcacggccgcataccggtacgaactcgccgacccggatcacacgccggtgtcagtcacctaccgcgtcacgcccggcatgcgcatgcaactgaccgtcgaataccccggcaacgccgcaggagcggccagcctgcccgcattcggcatcgaatgggagctgccaggcgaataccagcacctgcgctactacggtaccggccccgaggagacctatcgcgaccgcaagcagggcggcaagctcggcatctgggacaccacctcagaggcgagcacggcaccgtatctcatggtgcaggaaaccggcagccatgaggacgtccgctggctcgaagccaccgacatccaaggccacggattgcgcgtcacccaacgcggcgaccgccacttcacggcgagcctgctgccctggaacacctacacgatcgaagccgcgcggcgccacgaggacctgcccgcgccgcgccacaactatctgcgcctgctcgcggcccagatgggagtcggcggagacgactcctggggagcccccgtccacacggcctaccagctgcccgccgacaggccgctcaccctcgacgtgaacctcgaactcatctgaccggcaacgggcggcggcatgcaccatcatgccgccgcccgtacccgtatatattcatattccccaaacataacaacgacatcaaccaggtgccgacccactgcatcacgcagggcatcggcacggtgctcaaggcccgccacctcgtgctgctcgcattcggcgcgggcaaggccgaggccagtgccgtccgtcttcgtcaattcatcatggccgaggggacgaaactggctcgcggcaccagctcggtcgtcagcagaatgtgccgtcgcacccgacgctcatgcttcaacccatcgatcagggtggagaatgccatgcgcgccaactccctttgatcgattgcatatgagctcagcgacggtgacgtgtaccgagcgatcgactggttgttcacgcttaccacggccaactcgtcaggaaccgccacgcgtagcgcgttcaatgcttgcaatgcccccaccgcgagcacgtcagccgccacgatcaggccgtcgggcatggtgcctgtcccgcgatggtcagaaaccaattgctccgcgagacgatagccgttctccacggtgaacgtgccggacgaatacaccagcccgtccgtttccaatctcaagtgagtagcccactgacggaacgacagctcgcggatatcctccggataatcatgcgtacccatgatgctgcctacgccgccaagaaacgcgacacgcttgcggcccgtcgcgatcattgcatccagagcgtccagcatcgtctgcgacagatcgggtcgcaccgaatcgaacagatgaggcgccggattcgtgtcgatacacacgccatgaggcagcaccgcgtgcaacgcacgtaaatccgcctcggggaacaccgtggcacccacggtgatgaacccgtcgaactccgatgcgcgctccgtcagctcatgtatggaacggatggatgcgggagggtccaattccatcgattccgcgcactccgcaaggactttccgcagatcggcgaagtacacatcctgtagctcctccccagacggaggcgcatccagcactgcgatcgcagggcggaacacgttgcgataccccagctcttcgcatacacgcagcacacgccgccgtgtctcctccttgatggagaacgacgagtcattcagcagacgcgacaccgtgctctgcgacaccccggcccgttccgcgacttccttgagcgtggccatgatatcctccccgcaaactttagtaaagggttttactacagcataacccgagatttgcaagatgccccattgcccgctgtctatttagaagtgcaacgcccttgtttgtcggttaattctagcagttcgtcggcgaacgcctcggccggcgtgcggtagccgagcacccacatgggacggttgttgatctcgtccacgatggcctgcacgtcggcggccatggacggttcgatgcgggagcgtttgggcaggtagcggcggattacgccgttgcggttcccgtcgtacgggtgtccatcatgtcgttcatgtccatcggtcctttccatgtggtttccatttcggacaccacccgcctgccatgcgcgcagcgcatggcccggggccgtgttcccgctccgataataatgaatgcaaaagcaccctaccccggaaggagattggggtagggtgcctatctttgtcgacggaagataccgacgttattcaccgtttggagtattggtcactgaacggtgaagccttgatccttggcataatcctttagagccttctgccagttgtctgcagctgttctgaaggaggttttgccctcgaagaacgatcccatgttgtcgctgtagacggatcgtgcgtacggttcaaagggcaggaactcccatttgccggtgacatccttggcggcttgggagaagatctcgttgtatttctgtcctccgaagaactcgttgtcgctgccgtcggtgttcttgagcgtggtcctggtgaggaagtccttctggttgagggtcttggtggtggcggggaagctgccgttggatacgcgggcgtcgatgccttcgtcgttggtggtgacgtattcgacgaactttttggcggcgtcgagtttgccatcggggatcttcttggcgatggctagtccgctgccgccgtattcgccgttgatgggcgttccgtcgatggtgggcaggagggctacgcggaatttgccggtggcttggggcacgccctgcaggaggttgttggccatccatgcgccgctgatgagactggcgatggagccgccacccagtgacttcatccaatcgtcggtccagctcttcgtgtggacgtcgatgaggtcttcgtcgcgcatcttctgccagaggtccatgaaccgctgggcgcctttgtccttggtgatattgatggtcagtttgtcgtcgttgagtttgtaggcgtggccgcccatggcccacatcatcgcgttgaacaggccaccgtcgccggagtcggaggtgatgtaggagccggtggcgcggatcttcttcgcgtcttcgtagaactcgtcccaggtggccggtggttcactgatgccggccttatcgaacacgtccttgtcgtagaagtaggccatggggcccgagtcggcgggcatcgcgtacaggccgccgttgatgttcacggagttccatgtgccgggggtgaacgtgtccttgagcttggcggtgtcgtagaccttgctcaggtccatgagcgtgtccgaatgcacgaactgcgggatggcgaggtattcgatcagggtgacgtcaggcagaccgctgccggcttgggccgcgttgttgagtgcggtgtaggtctcgttgggttggccgacgttgctcaccttcaccgtgatgtcaggattggccttcatgaaggatttggcggcgcgattgatgctggtgtcccacgaccataccgtcagttcggtcttgcccgagcttgtggtcgtgttgccgcatcccgcgagagggatgagcagggctccgatggcagccgtggctatgactgcgcgcgtggtgttgttcaggttggtcttctttccgtgcttgaccgtctctggccgtagcaactactttgtttggacgtcgagcataattatgtacagagatgggaaactcgtcaaaacaccagcgttttcatattgtcagtcccctgatgggcgctattctgaaagccgttcgaggatgacgccgggatgtctgtcccgataatgtgattccgcatttccgcaatcgtctcacccgaggatggctcccatgtacgctaaatccaatcccagcgacgcaagggccaacaacctcagactgttgttccggctgctgttccccgaccggcaactgtcgcgcgccactgctacggacgtgaccggcgagatgatcgacgacggcctgctacgtgaactggggtcggggaaacgggatggccgtggtaagccgggcaccttgctggccatcgatacggacgtgcttcatctgatatgcatcgatctgtcgcacccgtatgtgatgaccggtgccgtgatggatctgcgggtcagaatcgtggagcgtcgcgaacgcgtgcttgatgatggcgaccgggtcgatctcgacgatgtgctctcgcttgcgggccagatgatccggcttgccggttcggagcttgtcggcatcggcgtcgcagtccccggcgtggtctccggcgcggggagggtgatctccagttccaatctcggctgggacgacgtggagcttcgcgacatgctcgaagacgagttctcgctgccggtccgagtggacaacgacgcgaacgccgcgctgctcgccgaccacttcctcggacacggcaatcccaactgcctgcttgtgcagatcacccggggcatcggcgcgtcggtgctgctgaacgacaagttcgtggatggcgacgaccatgcggccggcgagatcggccatgttgtgatcgacccaaacggtccggcatgcacctgcggcaagcgcggctgcctggagacctacgtctccgccatcgcgttgcgcgaccgcattcgccgggacccgaatcggcgcgcggacatcctggccgaagctggtgcgaggctcggcgaagctctggccatgccggcgagcctgctgaatcttcatgacatcgccgtctacggacctcccgacatcgtcggcgagacgctgctcaatgcatgcgacgagaccgtcaactccttgtcgcggaacgactaccagagcggtatgcgggtgcgtcggtgtgagctcggcgacgacgccactctgcgagggcaggcggtctccgtgctgcgcgagatcgtgggcaggcgcgggctgtacgcggcgaccacgcaggtggacaagtcctgccttgagctggacggctactcaaagctgcgctgctactagcagatcaccgtgccgctgatcaagccgagcctgatagtcatcacgatgctgtcggtgatctgggacttcaacgtgttcaaccagatctggctcgtctcccggggagccccccgcgagacgaccgcgacaatcggcatcttcacctataagaaggcgttcgtgtcgttcggcatcggcaccggcgccgccacgagcgtgtacatccgctacctgctcaaatccggggagggcctgcgaccacgaatagggcaaccgcaaaccgcggcgtcgggaccatctccgtacaatggccccgacgccgcacacgccatctcaggaccgaacgaaacccaaaacaatccttagcgtcatcccaagaaaggaacctccatgaacggtcaaacatctttgcaaggatggaccatcatccccatgccgcaaaccatgcagcataaagcggacatcgcattgctgccaatgtgcggacgaatcaacgaagcgcgcgcagtcggtgacgatcggcacatacttgccgtgcagctcatcgacgacatccgcgcagccaccggattggaatgggatatcgccaccggcgaccgctggccgggattcatcaccttgacgacctttgacgacccccatgcacacccgtccggtgcatatacgctcgatgtcaccccggacggcgtgaccgtagcgggagtggatttcgagggtgtgcgcaacggcgtgcagactttacgtcagctcatccgccaatgcggcgccgccctgccctgcctgcacatcgaggaccgacccgccttcgaaacgcgcggctactacctcgacgccacccgcgggcgcgtccccaccctcgactggctcaaacactgggccgacaagctctgcctgtacaaatacaaccagctccagctctacatcgaacacaccttcgcgttcgactcgatgagcgagacctggcgcggttccagcccgctcaccccgcgcgacatcctcgaattcgacgactactgcgccgaacgcggcatcgagctggtcccgtcggtctccacgttcggacacctctacatggccctgcgcacgcaatccctgcgcgacctcggcgagttccccgaaaccgccgacgagccgttcgggttcatcgaccgcatgcaccaccacacattgaacatcggcgacgaccgcgccttcgccctgtcgtgccggctcatcgacgactacctgcaactgttccgctccgacaaattcaacatctgcgccgacgagaccttcgacctcggcaagggccgatccaagcccctcgccgaccgcatcggcgtcgcggccatgtacgccgactacgtcacccgcctgtgccgccacctcgaagcccagggcagacggccgatgatgtggggcgacatcgccctcgaacaccccgagatcctcgaccggctccccgaaaccgtcaccctgctcaactggcagtacgaccctcaggtcacggacgagaagatccgcaccgtcgccgaatccggtgccaagcagatcgtatgcccggccgtatggtgctggaacgcgctcttgccgcgcatcgacgacgcctggagcaacatcacccgcatggcccgctacggcaggcaatacggcgcccagggcatgctcatcaccgactggggcgacttcggccacgtcaacgacccacgcatggccatccccggcatgatcatcggtgcacaggaatcatggaacccggggcgaatcccggatgaggccgacatgctccgccgtatctcccgactcgaataccacgacgccagcggtgaactgcttgatattcttacgcatgcaagtcatgcggccagtttcgaatggaaccacctgatcacttggctggaacttgatgacggacaaggcggagtcaacaccggggtcctgcaaaccatcccgggactgctgccggaaaacgaacgaccggacgatgcgatccgcaccctccgggacgaaagccaggcaccgtcacttgcggaatcccgacggatgctgctccgctatctggagcaccgcatcacgctcggcgaaaccgcagatcaccttctgcaggccagtgcccgtcgaatctccgcgatcaccgcgaccgcaggaccgcggaacgcaggaaacgccgctgcattccgcatagccgtcgaggggcagcgattgctgaaccgggttggcctccggcttgcgtccgagaccgggatcactgacactttgcaaccgaacaccacgtctcaacatgacgatgaggcgaaccttgctgaagcattggagatctggatggaggcgtatgcggcgcaatggagcacggtcagccgagactccgaacttcgtcggctgcaagatacggtgtggaagttaacggaccatctgcgcttccaatccgtctgatgctgcgattgtgagacttcgaccaatcagatactgaaatgccgtgagggaccagattcagatccctcacggcatttcctatacgaaggtgtgtcacgtatcgcgagggggcggtgacgttttgttggacttcgttgtctgaatggtcgttcgcaacgatagcacgcacgtccaggcgacgggaatgccgtcgtagcggtcgatgaccggcggcaggtacaccttgcccgccgggatcccggactcggtgatgtccgtgacccacagctcgttcgggttcgcggcgcgggttcgggcgaatccggcgtctggcacaagaccgtcatctgctggctcgtcctggtcgcatacctgtacatccaatgcgagaactatgcgttcgccgctctgccgctcctcgtgttcgccgcctcgaaggtgaggcgcgagcgctgattcctcgcgggccgacgcatcgacgcggcccgcgatggaccaaaatccagaataaccgacattcgccgctgttccgtctttcgcccaaggcgtattctccccgtgtcttgaggtgcatcatgtattgtcgcggctaactaaccggcgaaacgcggcatgtttcgcattttgggcgaaaagcccaaggcccataggaggtattgatgacgttcgttgcacggtcggtgcgctatgtgctcagaaaacgagtgcgaaccatagtgctcctcatagtactgaccatcataacggcgagtatgctatccacgatcgcggtttctcgggcagctcaacaggccgccggacgaatcgagaaggaagcggtcggtggattcgtgctggccagcaacctgcagggcagcatgctcacgcctcgcggaggcggcatggtgcgtcccgccgacgtgcgccggatcgcccaactgcccggggtcgattcgtatatggtccgtcagaacgccaccgccgatctcgtgggggcgaatgtggcgaaggtccccggcggcgatgattacgatgcgaccaaggagcagcagttcggcaacgccgccaacgtcataggcacgaatgattcgtcgaaactcaacgtgttcacgtcgcgcacgctcggcatggccgaaggacgacatctgaaggcctccgacaagtacacgtcgatgatccatgaggatctcgccaaagccaacgggctcaaagtcggagacacgctcacgctcaaggccaacgcctatgacgccgacaacgaatcacattcgacggcgaccgtcaagaccaccatcgtgggcatattcaagggcgacagcgccagaaaggtatccagccgagcggaactcaccgccaacaccatctacaccgatctggataccacacgcgacctgtaccagtacaaggacggcaaggaaatataccaggacgccaccttcgtgctgtccaagggcgttgacgtggagaagaccatggatgccgcgaagaaactcccggtggattggaacaactatcagatcacgcgcaacgaccagtattcgtcgagcatgctgcatgccgcccgcggcgtgcgctcgatgatgcgcggcgccctgatcggcgtgaccgtctcggccgtgctcgtgctcagtctcatgctgctgctgtggatgaacgaccgccgtcaggagatgggcatactggtgtcccttggcgtcggcaagccctccctggtcgcccaatatctcgctgagatggtgctgatcggtctgccgtcccttgccctcggctggctgtgcgcgcagggaatggcccagtggctcggcaccacggcgctccattccgtgaacgcctccgcggcgaaggagctgagcagcatggggcaggtcggcggcgatcttgaatccagcatgtcggtgcgcaccctggattcgctcacggtgtcggtcgacgggaccgccatgctgtacgtggcgctcggactgttggcggtgatgctggtgtgcgtcgcggtggcgtgcatgccgatgctgcgcaaatcgccacgagacctgtcggagattcgatgatgagcatgaatgtgtggaagcgtgccacgttggcgatcgtgcgcaagccggtacgcagcggcatcatcggtctgctgatgctgatggtcttcacgagcctggtggcgcaggtcggagtctcgacggccctgcgtaccatgtccgacggcatcggcgcgggcatgggcatagggtttaccgtcagcgccggtgagaatcccatcagcaccgaggaggcgagccggttctcgcatatccccggtgtgacgaagaccgcctatgcgacgaagaccttggcgcaggtggatggcgcacgtccggtcatgccccggcagggcccccgactggactccgatctggccatgcaggtcagcgtgctgggcaccaccgattcctcattgtccgaggaattccagagtggcctgtaccgcttggagcagggccgccatatctcgggcgacggcgacaatgtgctggtccaccgcgacttcgcgttgcagaacggcctagcggtcggctcgacattccgtctccggcaggaggggcgcaacgccacggtgcgtgtggccgggatcttctccggcaacgtgcaggcccaaagccccctgccctcggacacttccgagaacctcatctattcgggcaggcgagtgacctccgctctgaccggaaacgaccggatcggcatgatccgatgcctgtcggataatccgcaggacctgtccgcggctgttggacgggccaagaccatggccggcggcaagtacgacgtcaccgacgattcggcccggctctccggcgtcctgcaatccgtgcagacggtgcgtgatctggtgcgcatggtgctgctgtccgtctgcctcgcggacgtactggtgctggcgatggcgctggtcttctggattcgttcacgcatccatgagataggcacgcttctggccctcggcatcggcaagatgcggattgtcgcacaactcgccatcgaaaccggactcatggcggcggtcgccgccctgtgttcgctgggcaccggcgccatgctgtcgggatacgtgtcttcccgactgttgcgcgattcgggcgtcgcgccgctggaatcgttgcatgtggaggccttgccgcctgagcagacgatgctcatcctgctgctcggatgcgcggtcatcgccgtggcccttgccgtgtcatgcgccgccgtgctgtccaaatccccgaaatccattctttcctctatgcgttaggagtcaccaatcatgtctaactgtctgcaactggaccatgtcgattacgcttacggcgcggcgaagatccttgttctttcggatgtcagcgcggatttcgaatccgggaagatgtatgcgatcaccggcccgtccggtgccggcaagagcacgctgctggcgctgctggccggcctggacgccccctcccggggagtggtccgcttcgaaggggaggacatcgccgcatcgggctatgcgaagcaccgtcgggagcacgtgtccctggtgttccaggaccataacctgatcgactacctcacccccgaagagaacctgcggctggtcagcgccaaggccgatatgaagatcctcgaggaactgggtttgagccgtgaggaatccaagcgcaacatcatgcacctgtcgggcggccagcgtcaacgggtggcggtcggccgtgcgctggtcgcaccgggccgcgcgatcctcgcggacgagccgacgggcagcctcgacccggagatgaccgacgaggtgattcatctgctgcagcacgccgcccatcagctcggcaaatgcgtgatcgtggtgacgcattccaagcgcgtcgccgactccgccgatgtcgtgctgcgtctcaggagcaagaaactgaaccgggcgtgacccgcctgggccgggcggcacccatacaccgcttcggcatttcggcactccggtatcccggcccttcggcattctggcaccccgcgctccggcgccccggcaccccggcgacccactcgcgttgccggggtgccgtattcgttctgcgccataatgtgcgtgatagtggaaccatgccagtgatgaatgatgaagtgcccggcgtggccggcatagcgagggaaacaaccagcatggcacacgacggcacccgattcacgtcgtcgcatggatcatccgatggccactcggccacgacacccacacgcaacaccaaccgctggctgccggctctcaaagcggcgttcccgctcaccatccccatctgcctgggattcctgtttctcggcgcatcctatggcattcttagcggcacaatcgtgtacatgctgctggtgcagctggtgttctgagaactcccctcagtcccctacgcggacagctcccctcagagaggggagccaaaaactcacaattgttgggccacccagtcgacgatatagggcgcgacttcctcgatctggtcaatcgcgacctcgaactcatgctgtccgccgtaccacgggtcgaccaagtcaatctgatcctcacgtccaggcttcggcttgggcaggttcggatcgaagctgcggtacatgtgcacttcggcacgcttgccggcaggcagcatgcgcagcagcgagcgcatatgcgaggcggtcatcggcaggaacaagtcggtacgctcgatttcctcgcgggagatgcgatgagcaaaatgatcgcgcgggatctcgtcgccatatccacgctcgcgcagcacgcgcacggcacgcgggtcaatcggatggctccattcctcatcggaaacaccgctggactccacatctacctgatcgcccagcccgcgctcattgaagaagtggcgcaagataatctctcccataggggaacggcagatattgccggtgcaaacggtcattacggtatagggctgagtgtcagtcatcacggtctcattcttaatcggggccatcactggccagtacggattatcacacggtgagtaatatgcagaacctcgtcaggcgaccgaaccatcaaccgtcaacgaggccgctgcatcacttggtcttgcgcaagatgcggaaacggtacgcggcgatgccgggcccgtccttcgcgggcgtgagccactcccctgcttcagcttcatgccaaagccctgcttcaaccagcgattcgacatccggagcataggcatcggcatccacagtggcgtcgagatcggtcacataggccttatccgcaaacggcagcgcctcggagaacagctgtgcacctccgaggacccaaatctcagaacgatccagaccgtcatccggaatcgcctcctgacgagccagatcaagcgcatcatcaaggccggtgaccacggtcgcccccggcgcacgatacatcggatcatgggaaatcacgatgttgtcacggttgggcaacggacggtacttcacaccaagcgattcccaggtcttacggcccataatcaccggatgagagacggtcagctccttgaaatgcttcatgtcttcagcacaatgccaaggcataccgccgttgagcccgatggcgccagcgcgaccttccttgtcgcgggcctgagcccaaataagattcaccgagaaagtctttgggaaatcatcgccccagtcttcttcagtggcagacagcccggcagatccgggctcgggttcgtgatagccgctacggctactgtcatgctccatttcgctgtactccttttggattgcggaactgggctttagtgtagtggacagcgcagactcgggccgcgttcacggcccaagttttatgccctgcggacaatgcctggtcagacaatatcagacagcaacaggcgccttgatggtggggtgatgctggtatccgacgatggtgaagtcctcatactggtaatcgaacaaggaatcagccttgcggatttcaatggtcgggtaagggtacgggtcgcggctcagctgctccaggaactggtcgacatggttgtcgtagacgtggcagtcaccaccggtccagacgaattcgccaggttcaagaccagcctgctgggccatcatcatggtcagcaacgagtaggaagcgatattgaacggcacgccaaggaacatatcgcaggaacgctggtacagctggcaggagagcttgccattggccacgtagaactggaacagcgcatggcagggaggcaacgccatcttctccacctcggccgggttccatgcggagacgaccatacggcgggaatcgggatgattcttgatcagatcaagcacattggaaatctggtcgatggtgcggttcggatcctcaggagtgggagccggccaggaacgccactgcacgccgtagaccgggcccaaatcgccgttctcatccgcccattcatcccagatgtggacgttatgctccagcagccagttgatgttcgaagagcccttgaggaaccacagcagctcgtaggccagccctttgaagaacaccgttttggtggtcagcagagggaaatactgggacaagtcgaaacgcatttgctgcccgaacagggaaatcgtaccggttccggtgcgatcggacttcaacgtgccttcggtcagaatcttgcgcaccagatcctcatacggcatgggaatgtcggtttgggggcgcgcaggaatacgggtgcggatatctgcaagttgttcttcggtcaaagccatacgcaccagtgtagcttagaggcataatagagacgtccacataaacgggagcaccggtcatgaaccgtgcttccccgccggtatcggtcgatagagccagttcgccgacggatgaaatgaaagaggatagccatgggtaagcgactgtgggttgagcgcaacaaggacggttcatgggatgcgttcagcgatgacggcgcgcacatcaagttcggcaaggatcgcggccagttcacgccgggtgatctgatgaaggtcgcgctggctggttgcgcggcactgtccagccagttcgccatcgaacacacgctgggtgaaggcaagggcgccaagattgtggtggatggcacctatgacgccgacggcgacgcctacaccggctttgacgagcaagtggtgatcgatgcttccgacgcaggcttgagcgatgaggacgccgacaagctcaaggagcgcgtcacccgtcacatcgacaagggctgcacggtcaagcacacatacgtgcaggaaaccccggtgcgcatgagcgtcaccgtcaagcactgagacttacttgactcccctctctcaggcttcgccggtacagacagcccagtgagctgtctgtaggcgaagcctgagagagacggcagttgaacgaaggcagaaaaaacgaagaggctcccattgggagcctctttccgtattgagacttactgccgatcaggatcgatggtttcctcgatcttcttggccacctcgggctcggccttggtcaccggaatctcctcgacgccggcaatctcctccaacgacttggtgggcacatcagcaggcgagctcggcacggtgtcgagacgagactcagcagcctccacatacttgcgcggcaccacatacaccggtccggctgcatgctgcagcagtccctgactggtggaacccagcagcagaccggtgaagccaccgcgtccacgagagcctacaaccactacatcatggtcgaagctggccttggtcaacgcactgacggccgggccggagacgatctgcttattgatcttcaggtcaggatgggcctcctgcaggggcttgatacgcacctcaaggtcttccttgtaggattccatgaccgcgtcttcgccgtcaacgcccttcaggttcggcacagcggacatcacatccagctctgcgccccagacggcagcaaagtcggcggcaatctccagagccttcagaccccacttggattcgtcggaaccgacagccaccttggtgatggtgttgttcaagtgcatcagattaccgtcatcatcggtgtacggaaccaccacaatcgggcagtatgcatatgccggcagcgacgaagacgtggtgcccagcagacgctcggccaagcctcccttgccgcggttgccgataacgatgaggttgtagttgcgcgatagttcgacgaacaccgaagcgggatcgcccgtgacgattagtgtggcagcttccacaccctgctcatctgcgatggccttggccttggacagaatctcctgagcatcggaatgcgcggcgctgtcatcccccatcgccgtatatgtggcatcgaacgatacagcagcatagctcggcagggaatacgcgcagacaatctgcaacgtgagtccggcatgcttggcataattcgcggcccaccatgttgccttatagctggcatgcgacccgtcaacaccgacgagaatggccttgtcgttaatcatgacgacctccttgaagttattgcgatatgtaatatcgcgtactttcaacaataccccgcgacactcggatttgctggcaaactcagccgaaaaagaacaacacggaattttgctggacatgtctcgctttgccgtggaatacttctccccactccatacagcgctggtaaaaacgcaaaaagcgcgccccgagggacgcgcttcataagagcaatgcgagctacagcacgcggcgaatggaatatccgccggagaacacggaagtgctggtcacctgcgttcccaagccaggagacagtgcgttcatgaccagaccattgccgatatagatagctgcatgagtgccattggcaatgatatcgcctggctgcgcttgtgcgaggctaccgacagcagtgcccacaccggcttgtgcgccggaggagtgcggcagggagatgccgaattgcgcgtatacgtactgcacaaagccggagcaatcccaaccagagggagtgttgccgccatacacataaggatagccgctgaattgggaagcaaagcgggccacatcagcaccggaaccagtggcgctgcctaaatcaacctgcggaatcgcggcacgttgtgccgaacggctcgcggcctgggtctgcgatgcctgagcctgagcggcggcctgctcttcggcggccttacgggcggcagcatccttttcagcctgagactgcgtctgcggcacatcaaggctttccacatcaccccaactggaattgtcatcagtggaggtggcagtcgattcggcaagaatgttcttcttgaccgtcgtcactttcgggaaagagcgagaagacaccacagcagtgcccgtatcggcagcgttgaccgtcggtgccacacaggcgaacattgcggcagcggccgcaatcgtcaccaatgtagaagcaatgtgtttagcattcatcatcaacacggaactgtaacatacccggggcaatcttcaccagtcgagcacagcatcaaccgactggtttcataggcaacacgccgaagcatcaatcagccctataacgcaatcgactccgacgctgacgcaatcggagtcgatgtataaagcctttggcgcctacggaatgcgcaccaccatggtcaggcgattaggcaacgtgccggcaagtgccacaacgccgccggtccaaccaccgtgaatggccttgccgcctcccacataaagaccaacatgatcatagtgagcgccgccattggtgccgttggtgtacttgtaaatcaggatatcgcccggctgcagcgagccatcggtcaccacatagccaccgggaacattggcatactgttccggccatccatggaagctgataccacgggcagccagcgcggcagacaccagagcggtgcagtccatcgcactgccgatcaaggagtacgcacgatcaatggatgccgcagcaccagcggaaacaccggcaccggtatcggcatagctcaacgaagtacgagcctggctacggctggcggcagcggattgagcctgagccgcttgagcggcggcctgctccttagcggcctgctcttcggcggccttacgagctgcggcttctttttcggcctgagactgcgtctgtggcacattcaagctttccacatcaccccagctggaattgtcatcagtggaggtggaggtagcttcggcggtcaggttacgacgaacctgcgagtaggacgggaacgacttcgtagaggtcactgtgccttcatcggcggaggctgcgggaacaacagcaaacagacatgccaccgccacacaggacgcgaaaacagaagaaagtgctgattttgccttcataaatccttcaccttacaccgtgccggttaatggcccaaaatgcgatgccgtctgctcccattgggaacattggatttcttcggcgtgccgaatgcgccagatcagtaatgaatgtactgcagcgagccagcctcagcagcagtgaacgaacgcgaggagataacacccaaacccttcacattggattcggatatctcgatggaaccatcggcgttgatcttctcgaccacggcgacatgcccatagtaggaatcagcgccttgctggccgggctggaacaccacgacgtcgcccacatggcgaggcgtgctgtccacccagtagcccagcgcgctggcgctggaggcccactgaccaccattaccgaagctgccaccaaccggcagacccaactcggtgcggcgctgataggcgtaccacgtgcactgaccccacgggtaagtgtttgacgcgctcctgcctacagcatggttcggattgaaaccagcaggcagcaccgactgatccccgtccatccacgcggcaaccaccgggttgttggcggtgttgtggttcatcaagtcggtattcaacgagctgtccgagttgctcaggccccagccgccctcgttggaggactgcgtggcattggccgcggattcattcaaatcggtacgggcctcggaacgggaagcggagctcacatcggtgacgcgcttaatctgcgtagtcgtagtggccgcatcggcaagcaccggggaattctcttcagtgttggcaaaagccattgcagtggcggcagtaccggccaaagctgccagagaggcagaagcaagaatatggctgcgacgttcagccgcgcgggcggcctgacgaatagaacgacgggtctgcggagcgatttcgttgatcttctcagctaccgcgggatcaagacccagcacggcagcatcgctgccggcagcctgcatggcacgaacggcgcgagcacgatgggaccctttaccggaggcaaaaaataccttcgctaagctgaactgctggcgcgagaccttggtcgccttgtgcgaagcatgcttcatactgtaaaaactccttggatgggctcacgggcacctgatatgggcgtcaccgttccgtcacaatttgctactgtacaacgaactggggccaatgcccaaacgcatagcctacacttcgggtgcatcaaacgttttacttcgtgtcctgaaatcaccggaaaagtgcttcattccaaccgtttaccgcctattgttcatccgtttatcggaaaagtcatgacacagctcccccactctggctacccttggaatcatgacagtgaacattcccgcatcgcttaaacccagtgacggccgtttcggctctggccccagcaagattcgcacggagcaaatcgccgcgctcgacgccggcgccaccacactgctcggcacttcacatcgccagactccagtcaagcaattggtcggctcgattcgcgaagggctcaccgaattcttccacctgccggaaggctatgaaatcgccttgggcaatggtggtgccagtgcgttctgggaaatcgcctgcgcatcgttgattacccgccgcgccgcattcggcacgtacggctcgttcagtgcgaagttcgccgcctccgcagccaacgcaccattccttgaggatccggtgttgttcgccggcgagcccggcacctatcgtctgcctgagctcaccgagggcgtggacacttactgctgggcccacaatgagacctccaccggcgttgcagcgccgattcgccgtgtgccggaaagcttggaagctggcgcgttgactgttatcgacggcacaagtgcggcaggcgccctgccggtggatatcagccagaccgacgtctattacttctccccgcagaaggccttcggctccgatggcggcctgtgggtggcagcgctctctcccgccgccatcgaccgtgcggcaggtgttgagtccagcgcacacctcgaaggcgcacgccgctgggttcctccgttcctctcattgaccagcgcactcaacaattcccgcaaggatcagacgctgaacacgccggccgtggccacactcatcatgatggagaatcaggtgcgctggctgaacaacaacggcgggctcgactgggccatcgctcgttgcgccaagtccgcttccattctgtactcctgggccgagcgttccgactatgcacagccgttcgtctccgatccggaagcacgctcgagcgcagtggccactattgatctggacgagcaggttccggcaagtcaggtgcttgccattctgcgagagaacggcatcgtcgactgcgccggataccgcaagctggggcgcaaccagctgcgtgtcggcgtgttcccgtctgtggaaccgtctgacgtcactgctctgaccgcatgcattgactatgtggtcgagcatatgtagcgcaatcgtatccagcgattcatcgacgtacaggagaggggcatgtatagcccctctcatttttttgacgttcctgtttactattgtcgttgagtatgaagttcgcgcccattatcgacccagccgtccgcaaacccgcacccaaacccgtgcgagtggatttgcgtaaggcatttggcatgggtacgggcctgtgggctgtggcgctggtcatcgccctgattctactggcgtttaatcacagcacccttccgctggtcatcatgtgcgctgctggcgtgattatcggcgtgctgctgctgatttgggaacacttcgaccgctgggactaccgccgtctcggtcaatgatcattgggccaacggcagtgtcagactgaacgtgctgccctgtcccggcgcactccatacggatacgtcaccgtgatgcgtcagcgccacatgcttgacaatggccagacccaagccaacgccatccgcagtacgttcgctctgcgaggagccacgatagaaccgctcgaagatacgagcttggtctttcttggcaatgcccacgccttggtcgatgactcggattaccgcctgctctccatccttggatttgaccgcggacacactcaccgtgccattcgccggagagtatccgatggcgttttccataagcttggtcacggcactgtcgatctggtcggtctcgccgttgatcaccaagtcttcatcgccggcgacattgagctggactttggactgggcagccagaggttcgagacgttcggccacttgccgcaattgtcccatcacattcagtcggttggccgaagacggcgtaataggctcctgcgcacggatcagcagcagcaaatcagataccatgtggttgagcttgctgcagctggatttcacctgccgcgcatcgtccatcacctgtcgctcatcaaggtttcctgcctccaaagaatcagcaagcttggccagggcatcagtggggctgagcaactgttcagacacgttcgtaatgaatgaatcacgcacctgggagaaccgaatcgcctcacttacatcggcaatcaacaccacgatgaaatgctcattgatgcgccccacagtaactttcagccagttcggtcgatgcaccgatcgtgtctctacatgattgattctgttctcggcgctgtcgtaccgttcgggagtggcggtggtcaaatcgaactgacgtttgccgccggtctgccgcacctcatgcacggcatttaatacctcttgctccgcaatggcatcgtccgagaccacacccaatcggtaggcggacggagagcaacgcaccacatcatcattgtcatcaatcactatggatgtggtcggcagcatggagagcaaggccgcggtatcgtcgcacaggtcgtcatcctcgtcatcgtcgatgagtggggaatccaaggaaatgcgatgcgtcacgaatcccaccaccagtacaacgactagtaccagcaacacaacggccgcaacaatgagggcagccacaacaggaaacggcatcgatgtcatactttcattgttccacacgtgcggcggcattcacgtgcgaccggcacgccgataacatgaatttcaggtgaacaacccaatgaacagtagaacaacttgaggttgccattatctacattgaagtaggaacggaatgctggaataatacactgatacaggttgcacaacgagaagcatgaaaggctggagaaatgcgcgttatttttaacgaggagctgaagcaggttgccgatgacctcgaccgcatggcgcaagatgtgcgcaaagcgatcaaaggagccggggatgctctgctgaatcaggacgttgaagccgctcaaaccgtgattgatggcgacatcgaaatcgatgctttggagtcctccgttctcgaccagtgcgtgaagctgctcgccaagcagaatccggtggccaccgatctgcgcgtggtggtttccaccatgcgtctggcctccacattcgagcgtatgggcgatttggcccgccacgtggccgaagccgcacgccgcacgtacccggctgccgcaatcccggaatccgctcagccggtatttgccgacatggtcgcgttcctggacaacaccgccgatcagctggtggccatgctcaccgaccgcgatgccaagaccgctgaggccatcattctggccgatgacaagctggacgagctgcatcaccggaccttcgacctggcgctgtccgacgagatcactcgtcagcagaccgtagacatcgtgctgctgggccgcttcctagagcgcctcggcgatcacgccgtgtccgccgcccgccgtgtggtctacatcgtctccggcttcgaccccaccaaggagccgacccgcgacgaaggcaccgacatcgactgataattgaacacttatcctcctgtggcttgaggaggatgcccgaaaagcggcgatccggctacggctggacgccgttttttgttgcttttaggcggtacaccggcatatccgccacgtagcaaatgtctcaccacgtagtgaatctcccaccacgatgtcagccgaattttgcatttcgcggaattccgccgttttgggacaccacgtggtgggcatttcacaacgtcgtgggtatttcacctcgcggtggggagttcgcttcgtggtggagcggcacaaaccgtttgaaacttttttcggcatagcaaaagggagtcgcacgataattgtgcgactcccctaatgcttaccgtattagcggcttaggctcacttctggccctgagcagcgacagcggcggcaccggcggcggcagcctccgggtccagatactcaccacgcggcttgatcggcttgaagttctcgtccagctcgtagagcagcgggatagcggtcgggatgttgaccttggcgatctcatcctcggacaggttgtccagcatcttgacgatggcacgcaggctgttgccgtgagcagcaatcagcacggtcttaccagcgcgcagctccggctcgatggcggactcgaagtacggcttcacacgctcaacaacgttggccaggcactcggcttccggaaccggatcgccggcgtagcgcgggtcgttattctgggcgtactggtcgttcgggtcgatctcgggcggcggagtggcgtaggagcggcgccacagcatgaacttctcgtcaccgtactcttcgcgaatctcggtcttgttcttgccctgcagagcgccgtagtgacgctcgttgagacgccaatcacgctgaaccggaatccacaggcgatctgcggcatccagagcgatgttggcggtgttgatggcgcgacgcagcagggaggtgaacacgatgtccggaaggacgttcttctccttgagcagctcgccgccacgcttggcctcggcttcaccctgctcggtcagcggtacgtcgacccagccggtgaactggttggttttattccatgcgctctgtccatgacggagcagtactaatttataagtcatacggttcagtctacagccgtatgccgccaaacacgagtatccgtcttagatatttcatctcaattaggtcacaacgccgcgttccttttcccggcccccttcccaaggggagctgtcggcgtagctgactgagggaattacagcgctacggaaagtgcgagcaccactgcgaacagcagcgtctggaagctggcagcacccagagcggggccaaatgcatgcttcttgacgctggaaatcatgcgcaccggcacacccgctccagagagcagcagcaccacaccccacggccaccataatgtgccgcacatcagtagggcaataatccatgcaataacacagcacacaatcagcaacgtgcgtgcgccggactcccccatacgcacggccagcgtacgtttgttatgttcgcggtcttcgtcgatatcacgtaggttgttcaccatcagtatgtggcaggagaacaatcctgccgccacggcacccagcagaccgccgacatccaccatgccacacagcgcatattcggtgcccaacactgcggccagaccgaagaacaggaacacgccgacctctccaagaccgacataaccgtacggatgcttgccaccggtgtagaaccagccggccactagcgaggccgcgcccacggcaaacagccaccatgcttgggaaatcacgatggcggcaatgccgcagacgcaggcgatacctgcacagatgattgccgcaatgaatacgtgcttggccggcaccagaccggattcggtcaaccgttgcggtttgccggattgcgattcactaccaccacgtccggcatcggtaccgcgaacgccatcggagtaatcattcgcatagttgacggcgatttgcaggaacagcgccaccaacaggcacaggaaagtcaccgtccagaaccgactcaacagcagatcctgctgcgcccggttcgcggcgcaataagccggctcaggatagattgcgacgcaggtgcccatctgctcgatatgcacacgagccatcgccgcacccaccatcaccgaggcgatggaggtggccaacgtcttgggacgcgcacccttgagccacaaaccaatggacataagcaaccttctttccgatataactcggctcccctctctgagaggagctgtcaccgtaagtgactgaggggagtcgctggcggtatcacccttcgactcccctcagtctcacttcgttcgacagctcccctcacccgaggggagccagaaataggtttcagccaaccagcggcttgaccagcgggaaggtgatggtctcgcgaatcgtggcaccggtcagcgcgataagcagtcggtcaatgcccatgcccatgccgcctgccgggggcatgcccacaccaagggcctcgaggaagtcctcatcaatatcgcaggcttcctcatcaccggcgagcgcatccttggcctgagccacgaagcgttcgcgctgcacgatcggatcgttgagctcggagtagccagtggccagctcgaagccgcgcacgtagagatcccacttctccaccacgccgggcttggtgcggtgccccttgaccagcggggaggtttcaaccgggaagtcacgcacgaaagtgggctcgtagagcttgtcctcgtagaagtgctcccacaggtgctcgacgagcttgccgtggttctccacgtcgtcacgctccacaccgagcttgtcggcgatctcgcccagatgctccacggaggtaccggggtgctcggggccgccgttcggcacgatttcctcgcccaatgcctcggacagggagtcgtacatgctgatggtcttccattcgccgccgaagtcgtattcagtgccgtcgagcagcgtgaccttgtgcgaaccgtagacgtccatagcggtctgctgcacgagttccttgaccagctggccgatggaatcataggtgccgtaggcctggtaggcctcgaccatagtgaactcgggagcgtgggtggcgtcgacgccctcgttgcggaaatcgcggttgatctcgaacacacggtcgatgccgccgaccaggcagcgcttgaggaacagttccggggcgatgcgcaggtacagatccaggtcgaaggcgttcatgtgcgtggtgaacggacgggcggccgcgccaccatgcagggtctgcagcatcggggtttcgacctcgaggaagtcgtgggtatcgaaggtgtgacgcagggatgccacggccttggaacgattgcgcaccatgttgcgaatgttctcgtccgcgatcatgccgatgtacggcttgcgggtgcgggtgtcttcgttcagatccttgtgcagggccggcaacggctgcagagccttggaggcgatggcccattcggtggcgaatacggacagctcaccggtcttggaagcgatgacgcggcccttcaggtacaagtggtcgccaaggtcaacgagctgcttgaactgcttcaaggagtcggcaccgatctccttcttggagatcatgccctgaatcttggtgccgtcgccggcggacagctgcacgaagcacaggccgccagcgttgcgcaggaacagcacacgaccggcgatgccgaccatgtcttcggtctcctggccagcttcgagcttgccgtcgtacttggcgcgtacctcttcgatggtgttggtcacatcaaggtgcaccgggtagggggcaatgccggactcaagcatcatcgcgcgcttggccacgcgcatctgcacctgctcggggtgacccagcgggccgaactccttattggaggggtccacggcctcgtccagcgtggcgccggacttgatcttctcacggatagtggcatcctgcttgagcagcatttccgcacgctcaacagtgctcatctgcgggactgccggggtttcgttctcagtattttcagtgttctcaacaacttcagccatggttcatcagtgtacgcaaagcctacgattaagaacgacatgccgagttgctttgtccagcaccataatgtaatatctacgactgttgccaaaacgggctgtagcgcagcttggtagcgcgcttcgttcgggacgaagaggccgcgggttcaaatcccgccagcccgacccataaggagaaacgttgatctttcaacgtttctcctttttttgttttatcctcaccaagtatcactatccgtatcattattttgggttccgagacttaaagaaagtcggcggattctagtggtggttgcaacacaagtgttgcaaccaccactagaatccgccaatcaacggttccatccaccgacgcaatggcaatatcttcgggaattcgcatttgcacccagacagacttcttggtcgatcgagcaccaccacatgccatcgctccacgagtagccgcattttttgcatctcaaactaacaatatcggaacaggcgctgcagctgcgttgctcgcagcactgcccgtcatcattgcctatctatttcttcagcgatatttcattgctggaatggttgcaggtgtcgaaaaataacactattcaagcgcagcacgactctgaataaataccggcacaaggaataagcattcgaagcagcacatgctcatggcattgttgatggcgcaccgtaacatatcgcccgaatcaatcgatcgctgtttccgtatgcaatgccgtgaaatctcatgagaggaaatatgaagaagagcttgcttgcgctggcctcaggcgcattcattctcggcgccgccgagttcgtgatgatgggcattctgccgcaggccgcagccgccaccggcgtagacatccctaccgccggccactatatttccgcgtatgccatcggcgtgtgtttcggcacattgattctggtgttcggccgcaaagtgccaccaaaggatctcattattgtgttcatggttatcgccttggtgggtaacctgttctccgcattctccgccaacgccgccatgctcgtcattgcgcgattcatctccggtctgccgcacggcgcattcttcggcaccgccacgcttatcgccaaaaccctggccgataaaggcaaagaggcgcaggccgtatccataatggtcacgggacaaactttggccaatatgttgggcgtgccggcaggcaccttgatggccgattttctctcctggcgtcttgccttcggcattctggccgcatgggccgcaatgacgatagtgctgtcactggcatggattccattcgtggcaccaatcaaagatgccggcatcgccggtcagttcaaattcctcactcgccgaggcccctgggcgatcttggctgccgtgttcactggcaacgcaggcgtgttctgctggtggagctacatctctccctggctgcaaaagactggtggctggtcatcttccctcgtaccaatgctgatgatgctcgccggattcggcatggtagttggcggcatcatcggtggccgtattaccgatcggtggcgtcatgccggcactgccgctctcggccagtccatctcctgcattggtctgctgcttgtggtgctgctgcccggcaaccatggcactaccgcgttgttgacgttctggatcgcattcggattgttcttcatctccgcgccgcaacaattgctgatgaccgaggccggtcagggaggcggcgaactcattgcaggagccgccgtacaagtggcattcaattttggcaatgccatcggctcgattgtgggcggtgctatgctcacttcattctccatgaactaccgcttcaccggtttgggtggcgttcctctcaccctgctcgcagtcggcctgctcacgttctactcatggcgaggcgaaacggacaccgaggccatccatcgcatgcgcgaaatcaaggtcgactgagaccaagctcacagcctattccctgacgtgtctgtgcacagtattaatagactggaatcagacgcgattcagggaggtctctcgtggctgacgaagaagcattgctcaaacaatttgccgcacaattcgctcacggcccgaatgatgccgacgacacagacgcagcggccgcggcacaacacgcgaacaacccagaagatcaggccgcgaccaacgccgaacaatcgtcaacgagctttgacacccaacaattcctgaacggattggacgcgattttcgaccgtcatgcggccgccaccgaagccggcccgtatttggaacaggcgatggttgacgcagagaatgccggtgatgaagccggactgttgaccgtactcaacgaaacaatgggcttctaccgttcgcaaggacgccataaggacaaccagtggatcgtgcagcgagctctggaactggccgctcgcatgggcctgaccaccggcacatccgaagcatgggccaccacgctcatcaactgcgccaccgccatgcgcgccgccaagcaatacgaccaggccgaagacctctaccatcaggcccaggatgtatgccgtcattcgctggcacccaccgaccgcagactcgcggcgcttcacaataacctctcaatgctctacagcgaaacgaaccgaccggataaggccgggcttgagctgcgcgaagcactccgcatcatcgaagcatcgagcgtgaacccggacgaggatatcgatgtggccagctcgcatacaaatctggcgctgaccttgctgaccgagcacaagctggaaggcgcccactggcacgcggccaaggcattggatatctataagaccggtcatctggagcattccgcacattacgcctccgcattggccggctacgcgcaggtatgctttgccgaaaagcgatatgcagatgccgtcgccgggtaccgtcatgcgctggacgtgatcgaggaatgctacggcaaggacaccgattactggcgtatcaccgaagacaatctgcggcaggccgagtcccaggcacaagccgcgggtatcgatatcgttccgaatgacactacggatgcaaccactgcgtccgcacaggaagcgaccaacgccggcacctctcgccaaaattccaccggtgcaccagtcatgccgactgccttggtatccgattccgccgcaaccgccacttctgtagttggaatttccggcctgaaactggcccgcgctttctggacgcaggtcggcaaaccgatgctctcagcaaagtacccacaatatggttctcgcatcgccgtcggtctggtggggcacggatcggaatgctatgggttcgatgacgcatattcgcaagaccatgacttcggcccgcgattctgcttgtggctttccgatgaggattacgccgccataggcgagcaactgcaggccgattatgacgcgctgccccgagacttcagcattgacgcacaagggcatgcggtattctccacgaatacctcggctattgcaacagaccatggcactccctcccccatcactccacgcgcacagggcacaaaccgacgcgatggcgtgttccgcatcggtgatttcttcgagtcgatcaccggataccgcaccgctccggcacagacttcgcctcacgaatggttgatgctggatgaggccacactggccgccgccaccaatggcgaggtgtttgccgaccccaccgggcaattctccaagacccgccaaggattcaaagatatgccggatgatgtgcgactggcactgatttccaagcgtctgggcatgatcgcacaagccggtcaatacaatctgccgcgttcgctgaaacgtggcgatggcgccgccgcatggctgtccatccacgagttcgtgaataccgcctcctcattggtgtttctcatcaatgtgccgatggtggccggctatctgccgtactacaaatggcagttcgcggcactgcgcaagctgtccaaatcgatgttcgcgctgctgcctgatgtggccgaacaactggaaagcgtaatgcggctgagctcagcggcttgctacggcggcgccggtttcggcgagggcggcaagggttccgccccggcgattgaccaaatcaacgggattgtggaacatatcgccgcagagattgtcaaggaactccagagggaacacctgaccacgtcaaccgaaaccttcctggaatggcaacggccttacattgaagatcacatcgcctccgacgatccagtgctcaagagtttgtgaggctcgaagatgaccgacaaccttaccaccgacgaactgcgtgaaaccattgtgcaccatgaatggaaccaatttcagcacaccaataacgagggcggccgtgccgcctgccaaggcaattggccggttttccaccagatgcgtttggctcagttccttacgtggaagcgcccgttgctctccagctacgccgctgatttagacgaggccgaccacgttggccgcaatctcgtcaccgagaaatacggccgtatgatggcctccaccgcacccgacgacttcgcaaagaacatcgaaccgtacattccgcgcctgactgaatctcgtgtgtccaggcaagaacaggtaatcgcccagcaagtggcgtgggccgccgatttccgttcgcgatacccgaagcttggcgaggcgatgcgcgtgctgaccaccaccgaggacacgccagcgtccacctcatttgaaacatacctacgcggcgaactcggcatatactccgacgcgactttcgacctctatgaagcgatgatccgcgaacgaaccaccgcaacccctcaacacaacatcaccgaggaaaccctgctgcacaccgtgcagcttggcgggttcagcactcttgacgaggccgaggcggctcaacgctgacgctgcgcgcaccacaactacaggctgaatagaccccagaacgccagtgtggtgcatgtagcgagcgctgccaccaccatgatgatgccggccgcacggcgagcgcccatgatgtctgcgcggtgacgccataaccgctccgcgaccacggcgagcagcagtaccagcaccaccgtcagcgcctgcaatacccgccatccgatgccgaaaagctgcggatgtggcatgacatatatggccgccgcccctacggcacccatatacccgcacagcagtacggtaatcaccattatcgcaacgcctaagccggcaataggccctgcaacaccacggggcatggcccgccatgccagcgcaggattggcatgcatcgcacgccgatcgcgcaacgtgtacaggcggttaccgtcaacgactattgcattacgacgccggtgacggttgccgtcatcgtcaacatgcgtgccagcggctcttcgatacggccgattccacccggcaggcatgtttcgtcctggtacacgccgacccaacgcaccgcgcatgcgcagccaatccacaatatccatggcaacaccaagtatgaccgcaaccagcatgagcaccggtcctgcaatcatgatgcccgccagcacaccaagcgagccgataatacccgacttggtttgctgcggtgccgcgaactgctgatgaggatgcactccggcgatctgtggcgtggcccatccgtcagcccgagcgcctgcggcaataccattcacccagttctccaacgcctgcgtatacccttgcgccaacggtagattcagcgtgaacagtcccttgccggcccgcatctgatggttgccgacaaagtaccgcacagtaacgttctcattgcctgcgctgcgagccgcgtcaatgatgcgctgcgcaccttgctcaatgggcatggcggtgtcataagcgccgtaattcaccagaagcggcatggtcaaagaacgcaggtaatgatcggcatcaaaatcggcataggcaagatcaaaaggagcgtagttgagcgacatgagtttggccatgtctttgaccacaggagcgggcgcgccggcttcatgcatataggcgctgacggccatggccatttgctcgcgccccttgaacaccggtgccgaagtcaggacggcaaaagcgatatcctgccgcttggatgccagaatcgtggatatccatgtgccttcggattcggcgtagatgccggtttttgccggatcgacgcctgcagtgctacgcaacacatccaaagaactgctgtattcgcgggcgaatcgctggtagtcgcgatgcagcacggtgtaattgtcattgcgcttggccggaaccagcgtcacaataccggcggatgccatagcgttggcaatgtcgccgaagtcctcggccccgctggtgccggatccatggatgaacaggcaggccggacgactgccaggcgcatcaatcggctcccgcaagatggccggcaacgtgactccatcgtccacttcaatagacaacttcgtttcacgagtgcgatatctgccctcatgcggaatgtccgcatgagcaggagcaatagcgggatcaggcgaggaaacggcaatatgattgttataaggacgagtgctccactgcggcatcatcgcccagccaagcagggagaacactaacgcaatcaccaccgcaatcgcagcgatattcagcactcgccgcactgtgatccgcgtcatccgttctacctcccccacaagcatagaacgccttacttcagatatcgcatagtaccgaagtatgatttcttagcccctcagtcagctgtgctcgcaaaggggcttgccaaacaatacgagttattttttcttcacggcgcccataatggcccacacgatagctatggccaccaagaccacgcccactattgcgcagacaatagccaccaacacctgcggatcagcggcgaactgtgtgatcagcatatcggggaacgtcacgccgaagaacaaccccagtgcgccaatcaatacgcccaatagaccgaagataacggtcagtgtactgatgctgcttttcttggcaggttccatccttgtgctcgactgagactgagcatccacatgctgtgcggatgaggcgaattccgcattaggcgaagttccggctgcagtctgttcattccccgaggaagcgttgcccgccgcatagagcggaatgtcgcttgcgggcggaattgacgtatcggcaaccgcctccagaggaatcgtcttctcgtggtcgtccgacacgatatcttcggattcctgattgtcgtcagcagacggaatcaccgtcgttgccgaaccatcagccgccgtagtcattggccgagtctcatcaatactgtcgtcaaccacgggcagggccgaggtctccaccgcatctgcagctgttggcagcacctcggtctcagccgccgtttcattatcgggcgaatgcagcaccttggtctcgtctgcatcgtcggataccgacagcggacgggtcttggcctggtcttcgatggtcttcagttccttggtgtcgtcgctcatcattctgccttccctgagtcctcggtgtatccgttcgtcgtatcgaagttgttcctgaattgcatatacgtcgacccttcccaatccgagatataggtcatattcacccgggcgccggccgagaaggggatgtcgacgagcagctcagggccatttgccggcattttgctatcgtccgtcatccaggcatagttggtgtcatagctgtcgatggaatacccctgatcggtatcggaaaacccgataaagtccaccgtgtcatatatcaccgcatacttgccgcccatgctgttgctgtacgtgtacccgcgccacgcactgccaatgccgtaggagcacccgtcaggaagaatgatgtgaacctgagcctgaaccgcggatatggtgatggttcccgccgggcagttgctgatggacgtattgccattcgacaattccagcttatgaggcgcatggctgctttcccaatccgacaggtcaagcacagcctggctggagtcgtagtcgtcaccggagaaccatacgcccctcacgagtttatcgaatgtccgttggctggaatccgcataaaactggtcgttgacctgcacctggttcataccatacgcgtccaccgacgcatggccgccagcactggacagcgtgatatccgtgtaactgatattggtatgcgtcgcatcgtaatggcggatggcatacgtaccgctcgcgataatcatgcacatcgcgcaggctccggccatcaagcccagcggaatcagtccacctgcacgacgccccttgaatcccagcacaacgacaatcagacccatcaccacgcatactgcggaaatccatatggtgcccacgcgcacgatgccactgacgtccatgtcatattcccaaatcaccgccataacggcagcaaaagaaatgaaggacagtcccaatacgctcagcaccacaaccgggccggccggcttgcggcgggtggaggaacgcggcgccgcagccgcgacaggattgggcattgcatacttgcccgcaggaatgccatctaccggcatcgccgcagagctgcttgtgggattatacggccgctgccccgcctgcggaacaggctgtgaaacatatggaaccgactgtgaaacaggttgtgaaacatatggaggcatcgctgcagacggttgcatagaggggttcggtgcaaggttattcggattattcggtccgttcggattattcggcggcgcggtggactgaccaccgtggtacccgaaaccgtatccttcctgctgacgaacaccgctttgcgcaatcagccacagcaccagagcggcgagcgcaatgcacacccagccggcgcctggaatcagcacagccacagccataaacaggaagcagccaagacaattccaatcccactggccttcaatcaaatcttcggcgagaatctgcccgctgcgcacatcgggaatgagaaaccatcccattgcgtatagcgccgcgccaaaaccaaagaacagcgtggccacaatcatcagcgcacgcactaatgtcgggctccaaccgagacgctgcgcgataccactgcatacgccgccaatccaacgatcattgccgcggattaatccggaagaacgcacccatgtaaagaaacgccgcggagctttgcccggctgcggctgttgatacgaattcatatgtggactgctcatgcttccattacacagcccgaacgcaaccacaaggctcggggaacaccctgattgttccctgaacaccatgtaaaaccccggttccaaagccctgaacgcggcacaatagagatatgacatcaattcccgaaccgctgctgcccgcgcgtatgccgttgacgcgacccaaacgaggccgctggctcaccggcgtctgcaaaggcatcgcactacatctcggcatttctgtgatgtgggttcggctggcattcattgcactgacctgcttgtatggtgccggcattatcgcctatgtgttcctatggattttcatgccggccggcgatcctcaggctgtggcaagtgcggaacatataccagtggagcaagctccgctcgcgcggggcaaccagcccacacaggccggcgttgaagacacggccgtctcggctgagtcattatccgaagccatccagcgcgccccgaaacctgcgttagtggcgttggccgggttcgtgttgctgaccatcggcctgctgctggtcggcaccggcgctgatagccaactcatcattccgctgctgcttggactggccggcatagccttggcctggatgaatctgagcccgaacggcacgcaactgctctccatgctgggtggcatcgcgctgattttcataggatgggccgtatatgtgtcgaacgtgtcctatgcgggatggggcacctcaccgcgacgcatcatgctcagtggattcattatgattgcgtgcattgtattggcggtgatgccatgggcgaatgccatgctacaaaggctttcccgcgagcaggcgttgaaggagcgcgaggaagagcgcgcggacatgaccgcccatctgcatgatggcgtgttgcagacgctggcgctcatccaactgcattccgaagaccccgccactgtgttcaccctggcgcgcgggcaagaacgcgagctgcgcgaatggctgtatcaggaacgttccacatcggatcgttccgtcagcgccgggctgaagcagatcgccgccgaggttgaggacgaacatggcaaaccgattgaggtggtcactgtgggcgatgcccatccaagcgcccagaccgatgcgctgttggacgccacgcgtcaggcgctggtcaatgccgtcacacatggcagcgagccgatctccctctactgcgaagctacggatacgacggtcgaagtgttcgtgcgcgaccacggcgaaggattcgatatcgatacaataccgccagaccgattaggcatccgtgagtcgattatcgggcggatcaaacgccgcggcggtacagtggaaatcgtatccaaggccggttggggcaccgaagtaagaatgcacatgccaatcgcgctgaaatcggcacagggagaacatcgatgagtgaagctgcagcagaccgcattcgcgtggcggtagtggatgaccacgaaatgtttcgcgccggcgtgattgccacactgcgagactcttttgatatcgtcggccaggcggcggacgtgcccggctcggtggcgatgattgcccagaccaaaccacaagtggtattgctggacgtgcacgtgccgggcggagagggcggcggcggtgccgaaatcctcaccaagtcacgtgcctactcccccgctaccgtgttcctggccttgtcggtttcggacgcaccgcaggatgtgggttcggtgattcgcgccggcgcccagggttatgtgaccaagacgattaccggagccgatttgatttcctccatcaagcaggtgcatgaaggctacgccgtgttttctccgaaactggccggattcgtgctctctgcattccaaggtgtgccggccgccggagccgatggtgccgcacccgcgcacgatgaggaactggaccgactttccgcccgcgagcaagaagtcatgcgattgattgcccgcggatacacatataaggaagttgccgcggaactgtttatttcgattaagacggtcgaaacgcacgtgagctcggtgctacgaaagcttcagctttcgaatcgcaccgagctcacgcgctgggccgccgatcgacggattgtgtgagatataagacagctcccgctggcgggagctgtcggcgtagccgactgagggtggtcaacgccacgcggcacaaaccaccctcagtctcacttcgttcgacagatcccgccagcgggagctaaaaatcactcggcgtcgcggaaaccgttggggttcttggtctgccagttgagggaggaagcggccatatcgtcgatggtcagctcggccttccagtccagctcctttgcggccttggaggcatcggcatagcatgcggcgatgtcaccggggcgacgaggcttgatcacgtacggaatcgggtggccggcggccttctcgtaggccttgatgacctcgagcacggagtagccgtggccggtacccaggttgtagacgaacacgccttccttgtcgatgtggtcgataacggccacgtggcccttggccaggtcgaccacgtggatgtagtcgcgtacgccggtgccgtcaggggtgtcgtaatcgtcgccgtagacctgaacggccttcagctcgccaaccgcgaccttggccacgtacggggtgaggtttgccggaatgcccttcggatcttcgccaagcaggccggactcgtgagcgccaaccgggttgaagtagcgcagcagcacgatggtccaggacggatcggccacgtgaacgtcgcgcaggatctgctcttggaacagcttggaggtgccgtacgggttggtggtgccgccagtcggcgtctcctcggtgattggcagctccttcgggctgccgtacacggtggcggaggaggagaagatgatcttcttgacgttgtgcttcttcatcaccttgaggagcacgagcgtggagtacaggttgttgtcgtagtattcgatcggcttggctacggactcacccacggccttaagaccggcgaagtgaatgacccagtcgatgttgttttcagtgaagacgcgctccatcagagcctcgtcacgcacgtcgccgtcgtagcgcttgaccggcttgccggtaatctgctcgacacgctccaatgcgacaggagacgaattgccgtagttgtccacggaaataacgtcatagcccttgttgagcagttcgatgtcggtatgggtagcaataaatccagcgccgcccgtaaccagaacagtggtcatgtttcctccttgggaaggatgttgccttcggttttccttcgctgccaactttatcacagattgtgccaaaatcgaacttttgcgcaagttttctgttcgctcgtgttcataaatgtgaactattggccgggactatgctctatttcatgatgtccgcaacgatggcgtgcgtctcatcaaccttctgctccatctcctgcaccagcttgatctgggtacgggtacgtaccagattgtgctcaggatacttcgtggcaaagtacacgtcgccctccagataatcggcgaggaaacgcatgccgcattccatggtgagcaggttgccgctgaaagccaacagctcggcctcgcgctcggtgatgctgccgcgcagctcccccacaaaaccttcggcgtaagcacggaacagctcggtgctgaaatgcactttatccaaatctttctcatcttccaaagcagtggaggctccgaagcgaatcgaatcaccgaaatcgaacagcattgagcccggcatgatggtgtcgaggtcgatgatcgcacgcgcctttccggtggtggcatccatgagaatgttgttcagcttggtgtcgttatgagtcacacgcagcggaatcgagccgtccttcaatccatccatcacggtggcatactgatcagcatgggccagatagaagtcaatctccggctggcagcttgcggcacggccgagcttgtccgcggcaagggcggccttgaaatcctcaaaacgatgaggggtgtcgtggaagtgcgcgatggtttcggtcaactgaccggcatcgaacccggacaggaaattttggaagtcgccgaatgccctgccggcctcacggaatacatctggattcggcacgagattgtaagacacggtgtgctcgatgaatttgtatacacgccacgcaccgccatagatctcttcccacgttgcgccggaagtggtgggcacgatatccaatgtctccttgccccgagctttgagggcagaagtaactagttcgacattgcgcatcagatttaccgtatcggggaaaatgctggtgttcatccgctgcaggatgtaacgggggccatcagtgaccaccagataagtggtgttgatgtgtccgtcgccataaggctcgacgctgatgatattgccctccagtgcgaagtgtgaggcgatgtcaaatagtgtttccttgtttgcggccatgatgaggtccaatctccctataaagccgcaataagcggcattgcttatttgttaagtatatatacataaatagacattgatatgatctgcaacacccgagaacgagccacaacaccgtggacgaacgcgcatacaggggtatctgttttcaaagatgcacattctggccgttgcagaatgctatctgctttcaaagaggtacctcgatgcggaaaatccaagtacagatgttgatatttcaacgcccatacttggattttcgacgaaccggcacccctttgaaagcagatagcattttgcatggggaccgatgtacctctttgaggggagaaagccttctattttccgcatttctcccctcggtggactaactttgtcagtcgttgcgccaggcgatgccgctgggctggaggtcgaaggtctcgctcgacccgtcggccagggtcacggtggtcgtctgcggctggtcggtgttgttgaccacgcagtacaagcccggtccagggaagtgggcgacctcgcactccgggttgctggagctccacgccgcgtaccggtcctccttgtgggaggcccagaacagggcacgttccaacaacctggcgttggccgccgaatacggcaggccggagatatagacgccgcggcccttgccgtattcgttggccgcgagctgcacctgaccgttgtccgcgcgcaacagggtcacatcctcgctgaccggatacgtattcgccacggcttcgccgaagtcgatgccgcccagcggggcgatgccctggccgccgccgcagcccgacaggggcgcacggtagccggcccgctcccaagccccgcgggccgccgggtccacgggcacgtccgtggtgatgaaatgctcgggcgtgacgggcgggaagtacttgtccaccgacagggtctggaagcgctcctcgtccacgcccagcacgtccgccagctggaagaagcggcccgcctggaaacgcggcagcgagctcggctcgccaacgcccaccagcgcgccgccgtcacgcacccatgcgcgcagggtctccacgagcttcggattcgcccacacgtcgccgccggtgaacgccgtgtccaccggtccgccgttgatgatcacgtcgacgtccgggtccacgccgtgctcgaggatgtcatcgaagctgacgaacctgacgttgacgcgcatgccggacagggactccaggatcccgtaatacgagtacgtctgcttgttgggcagcgcgtgcgccacggtgaacgccatccaggagcgcatcctgccccacgagttcaggatcgccacgttcaattcgccctcggcggccacgccgttcgtgcgatcgtggatgtcgcggaactcgtccgcgatgtgcgtgacggtgtccacgaacttcgggaacttcgcggccagggacaggtagccgccgtagcccatccgggagatcggcgaacgcaggatcgcgcggcgggctttgcgccagttgtcgagcccctcgatgctcgggtcgttgccctcatagaacgtgtcggggaagaagtacggcaggaaacggccctccgtgtatttgacgccgggaatgtccgcgatcatgcgggtcgtggtgccgtcgccgatcgaacccaccaccgcatccaagcccagctcgtcgaacccgtccttgtagggttcagtgccgatccattggtcgcccaggaacatcatcgcctccttgccggccgcatgggacatgtccgccagctgcttgacgttcttgcgcacgaagccagacaggaagtcgatccagtcgcgctgggcctttctgggcacacgccatgcgctgttgtaggcgccaccatccacaaagtcctcaggacgcagacgatatccatattccttctcgaagtcgtccaaggcacgcgggctcacggtgcaggcgcagccgaaccagtcgaccaccttttcgcgacgcttggcgtcgaacagcaatgtgaactggtagaagaacgtggtgaaacgcaccacatcagtctgcgggctgtccttcagccacctcgcgaacgtgtcgaacacgaactttcgggtggcgggatggtagatgtcgaacgggatctcgtgttccttgtcgccccagtcgttggtcagatggttgtacatctcgaccgggtcccagatgatgtaggccaggaaactcaccgtgtactcatgccatgcggcaacgccgctcacatgcacggtgtcctcgtccgcgtcaagcgtccagttcgccgaatcgacgacctcgccggtggtgcggtctacaacctcccaatacttgtgagggtcggcatcacgattcggcttcagctgctcagcgaagaagctttccatcagcggaatatcaaccgtatccgattcggcgagaatgcgatcggtcagcagatacacctgtggcgtctcatccatatgcagcgtaatccactcgttatgcgcgcgagtcgggaaatacgcattgtaaatcttcttgcccaaggcaagcacagcctcatccagatgcgtgccatcggagttacgaatggcgtctgctccccacagttcggcaagctccttggtcttctccgcaaaattctcctcgctaggcaaggtgaagcggccggtgctagtcatagtctctcctttgaggacattgattatttttttggataattaaattgtaaacaatatatgcatataaaacaagaatccgacacaaccgtcgggcgtccaggatcctgactgtataaatccttgagagtagccccacggcaacgccggaagagcgaattgaacatcaccggagcttcccggtcagtttcaccgacaatctcatgacaagaatcaggaaggctctggatcggtatggttgcgtgctacttattgttgagaagccgtccggcgccggaaggagtagcacgaggcaccggacggcgggaattattggtcttaggctgtccgcttaacgcgtcgccttcggcccctgcaattaaggactcgcctacggcgagactcaatgctgccttcgctcggctaccgcctcgctcgggccgacgctacagacagcccaccgggctgtccgcttaacgcgtcagcccttgaccgcaccagcggcgaggccggcctgccagtagcgctggagaccgaggaagagcacgatcacaggcaacacaccgagcagagcacccatcatcagagcgccacgatcagtgaaggtagccagagagaccatgccgtacagacccaaggtcaccggcttcaaggtgtcggaagagaccatcatcaacggcagcaggaagttgttccaagtggccacgaacaggaacaggaagatcgtgaccattgccggagccagaatcctcaacacaatggtgaagaagatgcgagcttcgcttgcaccatcgatacgcgccgcctcaagcagctcgttcggcactgaggtctgcgcgtatacgcggcccaggaagaagccgaacggagagacgcagcacgggatgatgatggagagcatcgtgttggtcaggtgcatggcatggaagatggagtactgcggaatggtcagcagagcggccggcatcagcatgcagcccataatcacgccaatggcaaggttcttacccttgaagttgaactttgcggtagcgtatcccgccatcacagccacgagcgtacccaccagagcggaaacacccgagtagatcagggagttcagcacccagcgccagaactggccacgggtccaaccaatcagcgtgccatagttcttggcgatggcggcaggcaaatcgctcagacccacggcgaaccacagaccgttgctgccggtcatctggctcggcgtcttggtcgaggcgatgatggcccagtaaatcgggaacagaaagtagatcagcgcgaagaccagaacaacgatggtgatggtcttgaccagcgcggaaggctgcatggaacgaggcaggtcgttggcatgcttgtcgcgaatcctgtcagctttcttacgagcgcgtgcgaccgcgcgggattccttatcagtagcttctacggtgctcattctgcgttcaccttcctttcaacgagcgtgtagaccacggcgagtacgccagcgatcagtgccataacgatggccacagcggatgcaggtccgtcaccacccggggtcagcgtgccctgcgaggtattgagggccatcatcattggcgtgtacgactcggaaatgctcggatcggaaatcgacatcacctgcggctcgttgaacagctggatggtgccgacgatggagagcagcatggcaagcagggcggctgcacgcacgttcggcagcttgatcttcatggcgatctggaagccactggcgccatcgatgcgtgcggcctcgtacagatcgtgcggaatggcctgcagtgcggcgaggaagatcagcatgttgtagccggtgaaggtccaggtcgtgatgttggccatagagccgaggaccacattgtcgccgaagaagttcaccttgatgccgatggcggcaagtcccttaacgataggggaaatctggccgttgtagaggtacacccagatgatggatgcgaccacgcccggaatggcgtacggcaggaagtagctcagacggaatgcggtgatgtgcttgacgatataggaatcgatgagcattgccagagcaagtgccgcgatgatcatgaccggcacctgaatcacggtgtagagcactaccctgcccacgccagcccagaagttgccggaagtaataacgtattggaagttctgaagtccgacgaacttatcgaccagttccccgccgccgtatgcgccaccgcccgtggtgacctggcggaagaagctggaataaatagcccaaatgatgggaagaataaataccagagcgaacaggatgccaaacggtgccatgaaggcccagccggtacgattctcacgcttcacagcatcagaagcctttggcttatcggcacgcctggcgacccccgtcttcgccgtttttgttgttgcagtcatagggaaacctgtctttcaaaagaacagtgagaaatagaaagtacgtaatgcagttcgaatcgatgcagtcagatcaaacacaattaatgacgaaccgaactcgagtaaaaggaaaggccggagtgttgagctccggcctttcgatgtgtggttgaggatatcagcggctggaaggaaccctaaccgttaatgtcactcggaaacagacaggccgaagttcttcagcgtatccacagaggtggtctgtgcgtcggagaagatgtctgcaaccttgccagagccatcggtggccttggcggcggtttcgttcatcttggcgacgactgcggagaagccaggcatgtaggtgatgtcacccatgttgttgttagcggtcttgaattccttcatgatgtcctgaccaccgaagaaggtggaccactcggaaggagtctcagcgtcttcagtggtagcagccggcacgaggccctgggaaaccagatcaggaacctgggtgttgaaccaatccaggaactccattgcttccttcgggtgcttggagttcttcagcacggccacggcggaaccaccgtcagggccggtcttgccagcgttgccgaaccagtcaccgagctgagcgacctgccattcgccggagccggtgccaccggaggaggtcatgaacagcggggcttcccaagcggcggccacagtaccgatcaacgagccatccttgatggatgcatcgaaggacggatcccaacgcgggttggtggtggctgccttggcgtcgagcagctgctggtagaagtcagcggttgccttggagccatcggtctcggtgttgacgacccaggagtcgcccttcaccttgtaccaaccaccggaggcgccagccagaccggagatcatgttgccggcctcatcaggctggtaggacatgatgtacttgccagcggcggcagcggtcttggcagcggcgataaactcatcggcggtctgcggaatctcggtgatgccgagcttctcgaactcagccttgttgtagaagtaaaccagcgggccggtgtcctgcggcaggccgtaagccttgccgccaacctgaaccaggctgtacgggccggatgcgaagtcgttcttgtactgctcggcatactgggtcacatcctgcagcagacccttggtgaagacctcaggcagctcggcgtaaccgacctgagccagatccggagcctcgccggacttgacgtcggtctcaagcttcttgatcatgtcagaggccttaccatcgaacttggtggccttgacctgaatgttcgggtgctccttgttccacttggccacaatgtcgttgaccaaggtcatgccttcggaatcgggcagacggtgcatataggtgatgttgaccacaccgccatcgctgccggacttcgtgtcgccagcagtgtcgctgccaccgcaaccggccaaaccaatacccattgctgctaccgcggcaagagcagccacgatgcgcttgttgtgcgataccatatctctactccttcgataatggcgtcatcactcctctgtgacgactgttaatcagtttaggcgctcaaatctttattgtcaacctaactaacaatttctgcgcgccccagtggaatagtgacattaacccggtttgattccttattatgctcgttttgtcattttattaatactccttacaaagctacatacttatggtctaccagtggaccatgcgtgaaatacgaaaaagccccggattgctccgaggctcatcgttcacaggcggacagagcgagattcgaactcgcggagggttgcccctcaacggttttcaagaccgtctctttagaccgctcagacatctgtccttatgcacatgcgcatgtgcacgatatttgattatacaaaagggaaggatttggggagcggacacagtcgcactcccccataagccttacatgcagctaatctgccagcgggcctgatgatgaaatcaggcctcccatttagtcggctcgatgacttccttgccgcccatgtaggcacgcatggccttcggaatctcgatggagccatccttctgctgatggttctccatgatggcaaccagccaacgggtggtggccagcgtgccgttgagcgtggagaccgggcgagtgccgccgtcttccatacgctcgcggatgttcagacgacgagcctggtactcggtgcagttcgaggtggaagtgagctcacggtaacggttctgggtcggcacccaagcctcacagtcgaacttgcgggcggcggaggagccgagatcgccggcggcggtgtcgatgatgcggtatggcacctcgaccttggcgagcatctcctgttccatagccagcaggtgctcatgctccttgtaggagtcctcctgcttggcgtagacgaacatctccaccttgtcgaactggtggacgcggatgataccggaggtgtccttgcctgcggcgccggcctcgcggcggtagcaggaggaccaaccgcagtaacgcagcgggccattgccgaggtcgagaatctcgttctcgtgcatgccggcgagcgccacttcggaagtgccgaccaggtactggtcatcgggctcacgcaggcggtagatctcgtcggcgtgggagttcaggaagccagtgccgcgcatgacttcggggcgcacgagcgtcggggtaatggccagcgtgaagccgtgctcctcagcctggtcaacggccatagtgagcatggcaatctgcatgcgggccacctggccacgcaggaagtagaagcgggagccgcccaccttgacaccgcggcgcatgtcgatgccagccacgccggtgccgagggtcaggtggtccttgggctcgaaaccttcagccgcgaagtcacgaatctggccgaccttcttgacgaccacgtaatcgtcctcgccgccctcaggagcttccggctccacaatgttggagagcttccacatggcggtggtgtattcctcggcagctgcatcggccttggacttgaactcggcgaccttctgggagagttccttggtttcggcgataagcttggccttttcgtcagccggggcagaggcgaccttcttgccgatttccttctgctgggcgcgggcctcttcaaaagccttgagcgactcacgacggacagtgtcggaggaaagcacttcgtcgacgagttccacggactcgccacgcttgcgctgggattccttgacgatatcggtgtgttcacgaatgaattgaatatcaagcatgagcaccagactagccccgcaagccgacaccctcaacaaagaaataataaggagtagagcatgctctctcatacatcttttacggccgatgaaaccgcactcggacggtagcaaattccaccagacggaatcagggtgaataataatctcgcttagagtgggcgcattccgtgcaggaactgttcacgtacttcctgaatgcagcgaaaagaagccgtctcacgctaacaataggaatcatgccccagcctgcgctcactgtatttcttgttgtggccgcgatcgttatcgtcgcggtatgtgttgccgtcatcgtcatcgcgttgcgggcgcaccgtcgccgcaaactggccgagacattggagaaacgcagggatgacgaggtgcagtatgcgttcgtggtgaacccatccaagccacaggccaccgcacgcaggctccacattcaggagttctgcaaagccaagggtctgaatcgggtgcgcttctacgacacccaactcgacaaggacggacgtgactgtgcgctcgaggcgctcgaagacggcgctgacgtggtgatcgcggtcggaggcgacggcactgtacgcacggtggcaagcgccgtatccggcaccggccacgcactgggcattgtgcctattggcaccggcaatctctttgcccgcaatatgggcattcctgtggacgatatcgatgcggccctgaccgtggccacatcgcacggatcgcgcatggtggacatgggccgactcacgctgctcgatcatcccgaggacgaccacggccatgcgttcctgattatcgcaggcatcggcttcgacgccgccatgatcgacgacaccgatccggacttgaaggcgaatatcagctggctggcatacttcgtgggcggcgtgaaaaacctgttcgccccgaaattccgcggcaatttgactgtcaccagcgccgacggctccacacacaccaccaataatcttgcatttcgcacggtgatggccggcaattgcgggcagattcccgtattctcgctcatgcccgccgcgtcctatgatgacggcatcctcgattttgaaatcatcgacaccaccggcggcatcctgggttgggccaacctgttcggcgacgtagtgcaccaaaccattatcggcaagcctgagcagaacccactgtccaccaactcgaccattgagcaggtgcaaggtctgagcgcggaaatcgtattgggaaagccagccaaggcccaggtggacggcgatatgctgccggagaccaaacacatccgattctcagtagatcaccgggctctgatcgtacgcgtacccgatgcttccgcactggagaaaaccgctcaggtggcggcgcagaacgccaccgctgatttcgcggaaacgaccggtaccatcgagccgattcgctgattcactggcccatatgcgccagctgcggatggtcgggaatatccgaggaacgattctgatttgtttgatccgtgactcgtgccacatgcaatgtcaggtaggcaacctcgtcttcggtcagcgtggtatcgaggcgcagttcaataagggatgcgataagtctcgcgcatttcgaggcttttgcataggagctcataatcgaggaaacgattgcctccggctccctgctgagctgctcatgctgatgaatacgtacgaacaaataccgaagatgggtgatgaaacggccgacattaaccgaatgctcatccagcttgatgttataggtgctttcgatgacagcgagcaactgttggatgacgccggtcatcatatacgtaggagaaaggtcgcctgtggagaagccggcattcacaaaatgcagcgcaaaagcaacgctctcgctgggatccagcgcatcgtccaatctacggttcagcgcggcgagcagtgcgcagccctgctggtattcacgcttatacagcgaacgaatttccgagttcagcggatacggcacaggcggaatgccgttcttggcgcggcgtaaagcaccgcacacatgatccgcgagcgccatgaccaacgtcgagctttgtgcggcctctgaactcaggccaatctcatccatggtctcggaaatgagacgaatgatttcaggaggaatatcgcccagcaactgggccatatggtcagggtcacggccttgagccggcacgaacacacgagccactttggcatcgtcaactgtcatgccgggcttggccttgaaccccagaccccggccggtaaggatgacttcgcgcccccgatccttcgccaggacgacgttgttattgaagacgcgaagtatttccatgacatcccttccggtcgggatcttcaggttacggttgcgaaccgaccatgattactgttcgatggcgatgacttcgtcaccggccgcgacgttcacatccgtcttcggagtaacggatttgagcgctgcggtgttcagtaccgtaaccagcgtagtggtgctgaatccagccttcttgacttcgtcgagatcgacagtcgccaacaggtcaccggcattcactcggtcacccttggccacattcaccacgaaaccattgccattcatcttaaccgtatcaatgccgacgtgtaccagcacttcaacgccatcgtcggtcttgagaccaaaagcatggccagtctcagcaacggtctgcagcacaccggacaccggagccttaaccgtgccgtcaaccggctcgatgcccacgccctcgccgagggcacgagaagcgaacaccggatcgccggcatcgtcaagggataccacgtggcccgcaatcggagcgaacacggcggaagtggcggtcgcagcggcagccggggcatcggcaacggcaacagcggcggttgcggtagcggtggtggcgtcaccaccgttcacagccttggcggactgagccgcggcacgggccttggcttcggctttctgctccggagtgcggtagtcaagcatgataatcataatcatggcggtgaagaacgacactgcgatggagacgccgtaaacccacatctggttgaacaccggcacggtgagcagcgaggtgaaggcgaatgcagtagtggtcacgccgtgcacagtctcgccggaggcgacggtggccgggaagagccagcccatgacggcgattacgacgccgcccacgccgcagccgaccagcatacgggagtagatgagcttgtaacgcaggtggatgccgtaaaggctcggctcggaaacgccaccgagcaggccggcggcaagagcaccgacggaggtctggcgcatgtccttatccttgtcacggatggagaggaacagcacaccggcagtggcaccgaagcaggcgaagttccacacgcccatcgggccctgaatgaagtcgtagcccagggtgttgatgttcatgatcatcagggcgttcagcggccagtgcagacccagcggcaccaggaacgggtacagcagcgggattgcgacggcgaagatgaacggagcgtgtgtgttcatccaggcgagtccagcgccgaggccgttgccggcccacacaccgataggtccgatgatgaaagcggtgagcgcaccgacgatgatcatggagaagaagggcaggaagaccatctggacgctgtccggaatgatcttcttcagaccgtggtacacgaccgcgagcacggcgaccatcagcagcggcacgaacacgttgccggagtagtcggacagctgcatcggcagaccgaacaccgtagcggtgcaggaggaggtgcccagcgtggtgttcttcacacacttgacggcgtcgccccaggtcttggtgtcagacagggatgcgaactgcggggtcatgagcatgcccatgattgcgccgcccagccacggatccaccttgagcttcttggctgcattgtaggcgaccataatcggcaggaagtagaacacacccttccagatggcctgcacgaacaccaggccggtggtggcggtgtcgttcggaatcaggcccagggaaatgcacaggttgacaattgcgatgatgatggacgcgccaagcaacacacccagaatcgggcggaaggagtcggccaggtattcgaagaagctatcgagccatgcgaccttgccgcgagccttggaacgagcggcggccttgacctccgcatcagtcggctcatcggcatcgtcgtcaacggtgccggcgccgagaccagccatttctggcaggtgcatgatctgctcatacacggaggcgacctgaccgccgataacgacctggtatcggtcgccggactgcggcacggcacccagcacaagcttgttggcgtcgagcgcggcattgtcgaccttgccggcgtcattgagttcaaagcgcagtcgcgtggcgcagtgcgtcagcgacttgatgttggccgcgccaccaacactggtgacgattgccttgatatcgtcttgatgcgacatctcttactccattccttttccacggttaagccagtacctaccagagaaaccaccctgttcctgagcatctgcgttccaggaaccggcagtcacgccaaataacagaaaagacctgagatatggacgccatcatgaatacacatgactacgtcaacatctcaggtcttgcctcaacatttgagtagcaaccctgctaattactgactgaacagcgattataacgagctgataacaatccggcaaatcacacatatggtcaaagcccgcctatacctcgaaacataagacgagagtaaggaagaacaggctttaatcagcgatgaacatccggcgtgtctttcttggacgatgcatccgcaatgagacggcacgcaagcccacgcttaggctctttgtgccagatgcgcgccaccgtcatacacttattcgcacaaaagttgacaacttttaacacgatcttgccccagacggcaaaaaacgtggcagaatgaaagtatggtagcaaacaatgcgggtcaacccgccaccccagcagatctgatcaatgtcgatgaggttatcggcaagtactatgacctcgtccccgaccccagcgttcccgagcagcgtgtcatcttcggcacctccggtcaccgtggatcgtctctgaagacctcgttcaacgaggcccatatcgtcgccatctcccaggccatcgccgaataccgcaagaaagccggcgttaccggcccgctgtacctcggatccgacacccacgcgctgtccggcccggccaagaagaccgccatcgaagtgctcgttgccaacggcgtgcacgtgcgcatcgattctcgcgacgacttcgtgcctacccctgtgatctctcaggccatcctgacccacaaccgtgcggccgacggcacccagcgttttgagggcgaaggcttagctgacggcatcgtcgtcacgccgtcccacaacccgcccaccgacggcggcttcaagtacgaccccatcaccggcggcccggctccggccgaaaccaccaacgccatcgccgcccgcgccaacgagctgcttgccgactacaagaacgtcaagcgcgtgccgtacgaggaggccatcaagtccgagtacgtcgagggcttcgacttccgcgagcactacgtggacgacctggagaacgtcatcgactttgacgtgattcgttcttccggcgtacgtctgggcatcgacccgcttggcggcgcttccgtgaactactggccgctcatcaatgagaagtacggcctgaacattggcgtggtgcgccctgaggtcgacccgacctggcgcttcatgaccatcgatcacgacggcaagatccgtatggacccctcttccccgtatgccatgaagggcttggttgacgagctcaacggtggcgcttgggacaagtacgacctggtcggcggcaccgatcccgatgccgatcgtcacggtatcgtctgcccgaactggggcgtgatgaacccgaaccactacatcgctgtgtgcgtggagtacctgttcggaggcaaccgtccaggctggcccgagggtgcagccgtgggcaagacgctggtttcctcttccctgatcgaccgcgtagccgcgtcgatcaacgcgaaggtgctggaggtgccggtgggcttcaagtggttcgtcgacccgctgttcagcggcgaggttgcgttcggcggcgaggagagctccggcatgagcttcctgcgcaagaatggcctcgtgtggaccaccgataaggacggcctgattcccgacttgctggccgctgaaatcaccgccaagaccggcaagaacccggcccagctgcatcaggagcaggttgagcgcttcggcgaatcttggtacaagcgcgtcgacactccgaccacgctcgaacagaaggccaagttcgcggcactgtccggcgacgacgtggccgcctccaccctggccggcgaggacattaccgccaagctgaccgaggctcccggcaaccacgccaagatcggcggcctgaaggtcaccaccaaggacaactggttcgccgcccgcccctccggcaccgagaacatctacaaggtgtacgccgagtccttcgtctcccccgaggcgctggacaaggtgctcgatgaagccaccgaagtagtcgacaaggccctgggcgagtaaggattactcagcaagcctctccggcaaaactcagatgagggcttgattgttggtttccgccaataatcaagccctcatcttattggtcagcgttttcatatgaaaatatgcatctcaagcggctctgtactgctttatcgtgggacaacacgaaaaaatggccctttagaagatgttgtcccacataatatgggacgacattgcaatagatcgttttaaattcatgttgtcccaacggagtcattccaataaccgcggaaaaccgccattctcacgacaatcgacggaatcttctccaatgccgtgtgggacaacatggaaaaaacaagcaaattcacatgttgtcccacgctgaatatcatcgcagcaatgctcgcatcgtatagcaccccaagatacgagccaacaacgctccgagaacgattcgaccatcgacattgactcaatggctaagactccgcagctctgcaacaacattcaaattaggaggcatataagcaaaccagaatcgcccccgttggcaccgcacccaatcctctttcccgatgctagtgcacaatgcccatcgcaacgccgagatactttaaccctgccgacggagccgagtctcagccaactgctcaatagacatagcaattacctgaaaatcgaataccgcacctcgcaaagcaagagcacgtgccacattgaatgagaattctgcacatgcagcctcgtccgcaagattagccgccgtcgccacgaacgtaatccactgccgggcaaccaacttggatcttttctcttgatccctacgccactgcgttttattggtgcgatgatggtcgccatcatattcgattgcgaccttgaattcgggccacgccaaatccaacgttacaggagccccagatctaaaggtcatgtccggaactacataattcaccaccggctgaggaataccatgagtcagcaacgacagtctttcttccgactcttttggcgagtccacaccaggcataatcaacgacaacgcacgaacgcacatcgttcgtcctttgaaatgaggaagctcttctacaaaccgtatcagatcatgataaatggttacggcatcacggccttgagacaacgccggctgcctactcatggcggtaatgatggcatcgccaagcacaatcagcgttcgtagagatacatgcgccgaaagttgcgcccatgtatggaataaatcaagcgcataaacatttcggctgatttccacgacacccgctcgggccacgtgtttccaaatatgagtgcacaaaggtgagttctttactctgatccgtttgttcttagcgctggaaacggtatgcaacaacgactcgtcaagatcacagtcaacggggagcggtacagattgcaggacaagggacgtggtcataccgaaaagcagttttttatttaaccgctttgcttcttcaatgcagcgcgcgattgtctctcgtttacgctggtccaagctctcggacatggaaggcgtcatcgcactgtccgatccgctactcacggcggttgcgggcggaatcatggactccgtttcccagtcctctggaggcaaatcatacgccgaaaccggcatcattacaggtgcagcacgatttataccattgctatttactccattcatgagcccaccatataggcacgcaaatcacgaaggaagccaaatcggggtatgtggttccagcttcgccgcaatgctgtacatgtggataacttgctcgacaatcatgccgatttgacagcgtaactgtatttgatatagttacagtatcgatactgtacacagtacagttacagttgatttggcaaggaggagtccgtgaacggagactattcactagcagtgcacgcgctggtctatttggatcaccgcaatacgcacctgcccagccagatcttggccgagaacatctgtaccaacgcagctcgcgtgcgcaaggtgatgcgcccgctggccgcagccggtctcgccgccaccaaggaaggcgccgagggcggatacgcgctggctcaacccgccgccgacatcacactgagcacagtggccgaggccaccggcaccacttttgtggacgcgaactggaaaccgggagatatccacgaggagtgcctagtgtcatcctccatgggtgcggtgatggacggcatttacgatgggctgaaccgcacctgcctcgagcagttggcacacaccaccattcacgacatcaccgaacagatcttcagcggcgctagcagccaagcaaactagaccgccccgatcagtttcggcccttcgcaattcccgaggaatgcagtagcatcacagcccgctacacacctgcaaatggtcaggctgcaacatccgcgaacaaggaattcatgccggcaccagcgcaccgcacgcaccgcagaccccggcatcatcgcaacgaatcacacggcgtgcgccacaactcagcacgcctacgccacacacaagggaacaccgttgaccgcgaacacggtcgccccccccccgcaaattgttcacacctcacacaaggaagcattccatgaccaccaacaccactttctcccccaccatcaccacagatgtcctgattatcggattcggcaaaggaggcaagacattggcgaccaagctcagcgcaaccggccataaagtcgtcgtcgcagaagcgagcgccaacatgtacggcggcacctgcatcaatatcgggtgcctgccatccaagtcgttgattctttctgccgaacaggcgaatcgaaccgaagaaagcctgacgaccgaaactcgcgagacggcattcaagaacgcaatcgcagaaaagcgccgcgtcacctccatgctgcgagacaagaattatcacaagctcgccgaccaggacaatatcaccgtgctgaccggccacgctcgattcatcggaccgcacagcgcggaaatcgccactgccgatgggccagtaaccgtaaccgccggcaaaatcttcatcaacaccggcgccacgccgcacatcccggatattcccggcatccgcactacacccggcgtgtacaccagcactggtctgatggatattgacgagattccacaacgattggtgattatcggctcaggtttcatcggactcgagttcgcctcgatgttcgccgacttcggatcggcggttaccgtgctgcagcatagcgccgagttcctgccacgcgaggatgcggatatcgccactgcaatccgggaacagctggaggcccaaggcgtcaaattcctgttccatgcagagaccaaagaaatcgcaccggcgagcgctggcgacgtccgactttccgtcgcggtaaagggctcaacaaaagccacaccagagaagaacgcctcggccaattccacgaccacaccactgcaggaaacatacgaagcagaccaaccgacttcagccgcccacccttccgaggctcaattctgcctgactgcggatgccgttctggtggccaccggccgcacgccaaacatcgaaggcctgaatctcgaagcagccggcgtggagctcaccgaacgcggcgcggtgaaagtggacgagttgctgcgcaccaccgcaccggatatctgggctctgggcgacgtgaacggaggtcctcagcatacgtatatctcgctggacgattaccgcgtggtgttctcgcagctcaacggctccgaccgcccatacacggtgaacgatcggaagaacataccgtcgagcactttcctgcacacgccgtattcacgcgtgggtctgaatgagcgggaggcatcagccgccgggctcgattatgtggtcaagaaactgccggtggccgccgtgccgaaagcgcaggtgatgcgccagccggagggtctgatgaaggcgattgtggagcgcggcaccggccgtatcttaggtgctatgctgctctccgccgaatcgcacgaggtgatcaatatcgtcaaactagcgatggacctcggtgccccggccagcaccttacgcgacatgatcttcacacatccgaccatcgccgaagcattgaacgacttgttcgcgtagcggctatcgcccatcacccagcatcccacccagtgcgatagggtgggatgcatgacgattgttgtatctactgacggttccgcactcggcaatccgaacggaccgatgggctgggcgtgggccgatcacgacaagaacgcaggcggtactgccggtcatgagcatgacgatcacggctatgacgccggtggcgccaccaacggcaccaaccaaatcggcgaactgtgcgcggtgctcgaggcgctgcgcgcgcaccccggttcagagccgctgctcatcgaatccgactcgcagtatgccatcaactgctcaaccacttgggtcaagggttggaagaagaacggctggaagaactcgcagaagaagccggtgaagaacgtcgagctcgtcaaggctatcgaccgcgagatatcgcagcgccccggaccggtgaacttcaagtgggtcaagggccatgccggcaatgaaggcaacgagctggtcgacgagttggcacgcacgtacgccggagactgccgttcgggcgcacgcgatggctacctgccaatcgagggctggcagtcgctgctaggttctgaatacgcgcgttgcaccgacgtgccaccggacgtgcaattggtactggatggcaaagcggatgcgacaagtctgcgcaagccggtcgcagccgaccccaataccgcaccgggaggcaccccccaccaagtcaagccttcattggaagaattactgaccgagccggagggagtgccggattggggcgacgacacgcctaccgccgaggcgcccgccataacaattgacgagaagtccgtcagcaacgcggcaaccaacgatacgccacgtaacgcaacgtcctcacccaatgcggcacaatcgccggcagccgaacaaactccagctgcatcaacatcaacagcaacagctgccccgactcccacgcagccggcacaaccagccgcgaccaccccaacggccacccccagcggcctgacggtttcaggtgccttgcgcttctcccccgcgccgaaaaccagcccgtattttaacggccagcccatgcccatcagaggcagtatcgaggtgcagggatacgtggacggcgacggcaacttggtcatcaccaatgcgccattcacgcgacactaacactgaaccacacgaatacataccgcaatcggacacgatgtcacaaaatcgctcattcgcgttaggataaggagtaaggcttcacgccgttaatccatgcggcggaagcaaggatggcaaaggagaaaccatggataaggcacagcaggatgcgctgaagaaggcggccggcatcgaagccgccaagctcatcgaagatggcatgatcgccggtctcggcaccggttcgaccgttaagttcctggtagatgagctcggccgccgtcatcaggaagaaggcctcgagttcaccggcgtgactacttcccgccgcacccaggctcaagccgaaagctacggcatcaagatcgtggacatcgatgacgtggaccacatcgacgtgaccattgacggcgccgacgaggtcgacaagaacttcaacggcatcaagggcggcggcgctgccctgctgtgggagaagatcgtggccaccaactccaaccagatcgtgtggatcgtggacgagtccaaggtggtggacaccatcggcaagttcccgctgccggtcgaggtcatcccgttcggcgccggccatgtgatcaagaagttcgaggagcgcggttacaagccggtgctgcgtcttgacgccgaaggcaaggaagtgcgcaccgacgagaacaacttcgtggtggatctgcacctggagcgcatcgatcacccgcaggagctggccgaggacctcatcaacacggtcggcgtggtggagcacggcctgttcctcaacatggtagacaaggtcatcgtcggcgacccgaacggcccgcgcgtgatgaccaacgccaataagtgatcgttcgcatcactcaagcttctcaaggccgcatctgcatctcgcaggtgcggctttgttgtattgcacgaaccaactttcgtctcgccgcgtgacaggaacgcaccggtcttgacggcatcgaagcaaaagagaaaccccgtgaccgtaacgatcgcggggtttccaatgccttgaatgcaggtaagactacttgcgctggtggcgggtcttacgcagcagtttgcggtgcttcttcttgctcatccgcttgcggcgcttcttgatgacagaacccatctgaagcctccattccgattaatcgtaaaagttgcaactcgcccaatagtacacgtgttgccagacagagggaacacgcacgcacaattgcgcaacccaccggcggcgacaacggcaatcaccggcatatttgcgcaatacgttgcgctttacagcgggaacttctggtagaaacgctcgacggcggccttggcaccggtggcccggaacaccacggtatcgttctgccagatagccacggcgttcttgtcgtccaaggcatccaccttaaccgtgtaggaaccggtggtgctgccggagaccttcacattgccggcagccaattcatcaccggtctgagccgaagcaagagcatcatactgggtcttggcattgtcggaagcggaccactgagcaataatcagcgtcacatccttggccttgtctccggtggaatatgtaagcgtgtactcttcgagcggcgtggcagcggtccaagtggtggaagcctcggccttggtgcgcgcatagttcaacacgctatccggcatggccttcagcagttcagtggcatcatccggtaacgccgtggcctcgatggtcggcttggtgggctcggccgatgcggcggcctgctgcttgccctgaacactggtttcgtccttcttaatggcccaacccggccatacgaaagccgaaagcactgcaagaataatgacgaccgcagcggcgaccactactgcaatcagcttgccatgggactgcgtagacgaagagttctcagtattagtcatggctttgattctctcacagccgcgtgacgctggcgactatgtcgttcctgattgaggtgaatatatcgtgaatcggtagaaatctaccgctttgtatatcaccggctactgttgaaggtatggcgaaatcaagtgtgcagtacgtgtgttccgaatgcggatggaacggcccgaagtggtatggccgttgccctgaatgtgggcaatggggaacggtcgaggagtttcatgaagcccgtccggctgcgggttcacacaccgctgcgcccgggcggacatcacgcacacgatcggcggccgtgccggacaccgcgcgtgccgcagccaagccgattaccgaaatcggtacggaaaccgtggaacgcttgggcacggggttttccgaattcgatcgtgtgctgggcggcggcgtagtgccaggttcggtaacgttgattgccggtgagcccggcatcggcaagtcaacactgctgctgcagacggccggtaatatcgccagggcagtggctgaaggccagacaatcaacgctgctgggagaggccaatcatcgcatcggtcttccggattagcctcgactcgcgctcacacggtgctctatatttccggtgaggagtcacaggcacaggtgcgtctacgcgccacccgcattaatgcagtggaaccgaatctactgcttgccgccaccaccgatctggctaccgtattgggcttaatagagcagaacaaaccggcactggccatcgtcgattcggcacagaccattgtttcgcaggaagtcgatggcatctcgggcggttccacacaggtgcgagaggtggcaagcgccctgatcgacaccgccaaaactctcgatatccccgtgtttttggtgggtcatgtgaccaaggacggctcgattgccgggcctcgtaccctcgagcatttggtcgacgtggtctgccagtttgagggagacagcgaaacggccctcagaatgctcagagcagcgaaaaaccgttttggcccgaccgatgaggtggggtgcttcgacatgagcggcgaaggcatcgaagaagtcaccgaccccgccggactgttcttgtccggagatggcccggaatcagccaatggcgctcccgtggagggcacatgcgtgacattcacgctggacggccatcgcagcctgcctatcgaagtgcaagcattggtcaccaattcagtgctgcctacgccaaggcgtgccgtcaatggcgtggatcccagccgcattgccatgttggtcgccgtgctgtaccggcacagcaaactcaatctgctttccaacgatctgtatatttccaccattgccggaggtcaggccaaggagcccggttcggatctggccattgttggagcgctggcaagcgcggccacatcgaagccgattgcccgctccacctgtgccatcggagaaatatcgttgaccgggcaggttcgtcctgtaccgcgcatggaatatcgtttgcgcgaggcagcacgcctcgggttcactacggcggtcattccacccttgcgcaaaccggtgcatgttgatgggctgaaactcgtcgaggcgagcacgcttgccgatgcgcttcatgcattaggcgtacggaagtaatgggcagtgtcaagcggtaaggcgcttggtttcctccacattgcgcttgagttccgcaaccagctggtccggtccatcgaacttgacttgggggcgcaggaaacccacgaattccacgcggacattgtgcccatacaggtcgagccagtcgtcggtgatggcatatgcctcgaccacacgctcgtgaagtccggtcttctcgctgaaagtaggcttggtgccgatggaaatggcggcaggccaacggttgtcgccatccaccagccagccggcatagacgccgtccacaggaatgtatccctgtgtttccgagccgagattggcggtggggaatccgatggtacggcctcgctcctcgccgtgcaccactttgccttcgatggcgtgcggcacgcccaaaatggcgttggcgtcttgaatgcgcccgtgggcaagcagatagcgcacattagtggaactccaggcgcgcatggccttggcttgattcttcttgctccaggcacggcgctcggccttggtggcattgaccagcgggtcggcaggctcgccccattcggtcggggcttcgggccggaaatcacgcggaatacgcacttcgccaggaccacggtcatcaaccacatcaagttcaaagacaccggtggcggcggcgaggttggcgatatgcttgacatcgcctgcgcgtcccttgcccatggcggcgtcctggccaagtaccaacgtgcgcatgccgagcttgccggtcagctggccaaggaaaaagatgtaggacttatccgcaaaagccagcgtgtaatgaaccaccaatacatgatccacgccaaactcttcaagacgacgcagacgctcgtcaatgccggtcagcgcatcggcatccacattgctctgtgtcggttcctcaccgttgtgcgcgccggcccagccgtgcacgaacgcaggacgcggatcaaacagaatgacgatggaaaacgcgtcatgccgatgagcgagttccaccacacggttgatcacggcctgatgacccaaatgcatgccatcaaatgcgcccagcgtcaccacggccttcttgtcgttgctgaacgaaggccaggcaatcgagccttcggcgtcaggagtcaagtgcgtgatttccataagttgtgtggttcctttattcgtgcattcaatcaagtctcgctgtacgcgagtttacgcgagggggaatacggtgatcggcttggcctgatggccattcgccctctcgatgatggccaccacatcatgggtttgcggcacgatggcggcggcaggctcatgaatcgtgcgctcgatgcgacgcccaaaacgcagctccgcagcttcctccggcgtgatgtcaagagcgggcatggcgctgcgggcggcctgttccatggtcaatgagcgaccaatcagccatgcgcatcgatcagcgccgtcaagcccttccggggtgtcgagcacgcacttattgcgagtgatggtttcgccttcgcgattggtaaacgttttctgctcggtatgagccgtgatcgtatgggtctgcgtctcgctcaccgcatcaggcgaaagaagcccgctggtgtcgtccggcaaggcgaagttgccgactctggtgcggcgcaaacgggtcagataaccaccgacacccaacttgtcgcccaagtcacgggccaatgcgcgaatatacgtacccgacgagcagctgacgcgtacatcgacgtccaatactgaaaccattccgcgctcttgcaacgcttcatcagactgtttccccgtcacgaatccactgcgaatagccagcacagtgaattcgctgatagtgaccggacgtggcttaagctccacatccttgccttcgcgggccaagtcataagcccgctgaccattgattttgatggcggaaaaagtgttgggaatttgctcgatatcgccggtgaagttggcggcgatagtgcgagtgagtagctgctgccacgaggaagctggcaatgatgatggtccctcgctatgaccaccttcagtcagctgcgacgacagctccagccagcgggagcggacttcgtcatcgacaagcacctcgccttcggcatcgtcggtggtggtgcgcaagccgagacgaatggtggcctcataggttttatcatgtgcaacgatggcattgagcagacgcgtggcatggccgaatgcgatgaccaacgctccggtggccatcggatcaagtgtgccggcgtgaccgactttcttgatatgcaacgcgccgcgcacggcggccactgcatcgaaactggtcacgccttgcggcttgtcgatgacgagcaggccgcttggagttgtttgaggcatatgcggtgttccctttatccatgccttcggcatggtctctccctctgccccccctggggcacctccctcgtcagagggaggttgcggggaaactactcttcgtcggaagagtattcctcattgttgaggtcttcatcctccggctcgtcgtcgtgcttataggggtcggcgtcgccggcgtagtgagcagtggcgcgggcgcgcgcaagatcctcatcgcgcttcttggccatagccagaatatcttcgatctcgtgggcctcgccgggcacttcatcgaacacaaactgcagttgcggggtcaggcgcaagccggccttgtggcccaccaaagtacgcagatgtcccttggcctgatcgagagcctgctgggcacgcttacgttcgccatcctcgtggccttcatgaccaagctgggtccagtagatcttggcgatctgcaaatcattggtcacacgcacttccgtgacggtgatgctggacagtcgcttgtcgtgcagctcatgctcgatggacgaggcgaccacacgctgaatcagagccgcaatacgcgcggcacgtggattggttcctgccatgggaatttccttttctgtcgtgtttctagctccccctaggagggggagctgtcgtcgttagacgactgaggggctgagccgttaagcgaacagcccagtgggctgttcgtaggcgaagtagcggcgatagccgcaaatcaagtgaatacaaaaatagaggaggcatccagcaaaaaccggagccccctcagtctgcttcgcagccggctccccctaaaagggggagccgataaaagcgaggggctctccttgaggagaaccagaatgactacttgcgctcgacttcctgcatctcgaaggtctcgatgatgtcgccaagctcgatgtcgttgaaggtgccgaggttgataccagcctcgtagccttccttgacggactgcacatcgtccttgaaacgacgcagcgaagaaatctcgaggtcgttgaccgtggccacgccattgcgcagaatacggcacttcgtaccacgcttgacctcaccgtcctgcaccataacgccggcgatgttgccgaacttggaggaacggaagatctcgcggatctcggagtgggaggtgacgacctcttcgtattccggcttgagcatgcccttgagggatgcctctatgtcttcgattgcgcggtagatgaccgagtagtacttgatttccacgccctcgcgctcggcgaggtccgcgacctgacggttcggacgcacgttgaagccgatgatgacggccttgtcgaccgtggcaaggttgacatcgttctgggtaatcgcgccgacgccgcggtggatgacctggatgccgacctcgtcggacacctcgatcttcatcaaggaatcctcgagcgcctcgaccgaaccggacgaatcgcccttgatgacgatgttgagcatatcgatctcggactcggcgaacttcttcttgaagtcctcaagggagacgaccttgcgacgcttggccagctgagcagcgcgctcggtagcctgacgcttctcagcaatctggcgggcggcacgatcatcggaagccaccaggaacaagtcgccggcggtgggcacggaggtcaggcccagcacctggacaggcgtggacgggccagccgcatccatggcacgaccgttttcgtccaacatggcacgcacacgaccatacgaggtgccggccacgatggcatcgcccacgtggagcgtaccggactgcaccagcacggtggccacggcaccacggcccttgtcgagtcgggcttcgacggtggcaccacgggcgtccatgtcggggttggcgcgcagatcaagctcggcatcggccgtgagcagcacggcttcgagcagcttatcgacgttggtgccctgcttggcggagatatcgacgaacatggtatcgccaccgtactcctcaggaaccagaccgaactcggtgagctggccacggaccttctccggattggcaccgggcacatcgatcttgttgacggccacgacgatcggcaccttggcggcctgagcatggttgatggcctcaacggtctgaggcatcacaccatcgtcagctgcgaccacaaggattgcgacgtcggtaagctcggcaccgcgggcacgcatagcggtgaacgcctcatggccaggggtatcaaggaaggtgatcttacgaggttcgccctcaagatccaccgtgacctggtatgcaccgatacgctgggtgatgccgccggcctcacgtgcgatgacgttggtcttgcggatggtatccagcagtcgggtcttaccatgatcgacatggcccatgacggtgacgaccggtggacgaggtttcagatcctcatcatcctgcagctcttcctcgtcaaggttgatgtcgaactgctgaagcagttccttgtcttcctcctcggcggaaacaagctggatgttccagccgatttcctcacccaggatctggaaggtctcttcgtccagggactgggtggcggtagccatctggcccaggtggaagagcacggtgaccagtgcggcctggttgacgttaatcttctccgccagatcagccaaggaagcaccctgacgcaggcggatggtctggccgttgccgttggggatgcgaacgccaccgatggtcggtgctttcagctcctcatactcatgacgctttgccagacggttcttacgggccttagaggacttgccgccctgacggccgaaagcaccagcagtaccgccgcgaccaccgcgaccaccgccgcgtgcgggaccattgctcggggctccgccaccctggaagttgctgccgccgccttggccgccacggaatccaccgcgagcgccgccaccttgtgcggcaccgccctgacccggacggttatgaccccattggccgggacgaggaccgccctgaccgccttggcccggacgaccaccgcggaatccaccacggccttgaccctgaccctggcctggacgaccgggacggccgccacgaccaccttcagtggtcggacgagccatcggatgcgggcgaggaatatcgcccggagtcggagagtgcatgccctgcttacgggagaacgggttattgcccggacgcggaccctgcgcatgcgggcgcggaatcgcgttggaagcgttgcctccagcagtcggacgaggaccgccctggccaccacggttgttctggtgctgaccgggctggccaccgttcggacgcccctggccctgacgattaccgttcgggcggccttgaccctgacggctcggacgaccgccgttatcgtgctgattattgtgacgtgcgggagccggagccgcaggacgttccgcctgcgggcgcgggcccggagttgctgcagccggtgcggcaccctgatgtgttgcagaggcagccggcttgtgctgtgccggcttggccgcaggcttctgtgcagaagctgcgggcttggcatcgcccttatcgtccttgtcgaacgcggccttcagacgacgtgccaccggcggttcaatcgtagaggaagcggacttaacgaattcacccatgtccttgagcttctcaagaacggtcttgctatcgacgttcaagtccttagccagttcgtatacgcgtggtttcgccactaattactcctatctgtgaccacgcgtacatgggcgtggtcagttggtgatgacggcaagcctaccctgtctcatcgtgcgaccatgatcgtgttacctcgtctctggtgtgggagattttgcgcacactgcgccaacccacatacgccaatccagcatactcatagcgctggatagcacggaatagcgcgagccgcgtcattgttgacgcggctcgcaatgtatatccgccggctactcggaatcattcgatccggaagccgggctctcccaagctattcagcctgtgctgcagcccgctcggcagcctgttcttcagcgaccttcttggcatgcgcctcggcggattcgatgccgatcttccagccggtgagcttggcggccagacgggcgttctgaccttccttgccgatggcaagagacagctgatcatcgtggatgaaggcgattgcggtcttgttcttctcgctgatcacctgtacgccggtggccacggccggagacagcgcggcagccacgaacttggccggatcatcggagtagtcgacgatgtcgatcttctccggtccgaggttctccatgacggcacgcacgcgagcgccgctggggccgatcagagcacccttcgggttgacgccatcggtgttggccttgaccgcaagcttggtgcgggcaccggcctcgcgggcaatcgccatgatggacacggcaccggaaaccagttccggcacctcgcgttcgaacagcttgcgcaccagttccgggtgggagcgggagaccacgatttccgggcccttgatgccgcgggccacattcaccacgtatacgcggatgcgttcgccgtgacggtagcgctcacccggcacctgctcgcggcgaggcaaaatggcttcgacctcacccatggcaacatgtacgttggtgggatcggaagcatcctgctggatgatgccggtaaccagcttgcccttttgtccggagaaggcgccgaacaccttctcatcctcgactttgcggaacagttgggtgatgacctgacgcgcggttgcggcggcgagtcggccaaagtcgtgcggggtgtcgtcgtattcctcacccagttccggcgcggggtgcggatcgtcttcagtgggttcgaccggaatatcgtcggccgcccacacagtaaaactgccggcgcgctcatcgagttccacacgggcgtgcttggccgcatgcggggtcttgaggtaagcaagacgaagagcctctgccagcgcatcgtccaaggtttcggggtcgattccttgctcggcggcaagcttatgcattcctgtcaggtccagttccatcgatccgtacctcctatgaagttatgtggcgaatggccttgagtggtcacagttagctattagtgtagatttccatgcagacacgctcccccttgactggtttccgccgactcatggccggcgtatgcgcgggtgcgttcatatgttcgctttctgcgtgctcgatgcctcgattgtcggaccgagccgaagcggaacgaacgatgagtccctgcgagagcgcgctgacgttggcgaactttgccacgactccggccaagggcactccgctcatggtgcagtacggcaacggattggccgctcccctggcatggatcgatgttgccggacactgttccgggcgctttgccgaaggaacgttgcgcaacgcccagaccaagcaacgattgaccgtgctggccggcaaattcggacaaagcgcgccagaagtcacgccggcccgtcttgatggcatcacttccgcaaccatcgaccgatcggcattggatgcgatggctattgccgaggaccgcgccggatttgccctcgaagtgttggccgcccgcggggtgacagccggtgcaacactcacattgagcgacatgcataagaccgccggacagcagttggtgtcgctggcgaataggcgcttcagcgattctggttcaactgccgacgccggcgacagccaagacccacggcaaaaggtctatgccatcgaccagttgctggccgatccgaccaccatcgaagacaaggccagcgaacaaaccgtgcctacggcttccgccatcgaaatggattgcgcccgtgctgaaatcaaggccgtggccgattccacctcccaatccgacagcgataccttgctagtgcttgccgccctggccgccaagcatgcatacaccgcattccagcttggttatccctccggagactccgctttgtttgcgtagggatatagacggcacaggcagatcgcccgattacgcgcaaaaaacaggaactgcacgttaccgagcgagcttggccgaggcgcgctccaccacggtgaaatcggtggtgtaggtgcgcgccggccaggaatattcttcaatgcgttcgataagcatatccacggcatgtttggcgtaatcatccacatgcggatcgatggtggtcagcgccggcaccgagtactcggattccggcacattgtcgaagccgatgagttgtacatcggccggtactcgcagcccacgccgctgcaattcgtgaatagcaccgagcgcgatggcatcgttaagacacagcaccgcctgagggcacggcaacgaatccagcatggataccgcggcctgcacaccgccatgctgattccagccgagcagaggaatgacataccgccaatccacggtcaaaccgcgctcttcctgagcctgcacatacctctggatacgcagcgactgcgtgccgtcgcgctgatcgcgaacgtcctcccaaccatgcatgtcgggtgaggcgccgataacggcgatggttctcacacctgtgtccagcaaacgcccgaccgcgaaccgcaccgcctcggtgttcggcatggtcacctgatcgcatttcccatacgacagataatcgccgcccaacaccaccggatacggctgctgaagtacctcacccttgttctccagcgcgcgttcggtaaagaaaatccacccatccgcacccagcggtatgtctcttcgatattgtcggccagacccatgccacccgagccataggtattgatgatgacgccatactcgcgttgcttggcgaactcgataacaggcaatgcggctaccgcaccaacgcaaagcccccgaagtgcaagacttcgggggcttggttgcggatgaagcgagattcgaactcgcggaggctttcacctcacacgctttcgaggcgtgctccttagaccgctcggacattcatccatgctgcccaaaaggcaacttgtttattatgccacatcccgacgacgcggcaagtcggggttttgtgagtctacgccacctgttcatgcacggaagcattgacccactgggtctgctggacgttgtagccggagaatatgccgatgtcgagcatgcagtcgcggtagtcgcggccgtgggcgatggtgatgtagttgtcgtccaccaaacgattatgcgtgggatccaagccgacccatcggccatcctgatagacctcaacccaagcgtgagtggcgccttctcccccgagcagtcctgcaatgtaccgggcagtcaggccgacatgccggcacacggacagcatcacatgcgcatagtcctggcatacgcctttgcgctgcgccaaggcctgttcggcggtggtgcgaatcgtggtggatccgggagtatatacaaaagctttgtacacctcgtccatcacttcggcagcctgctgcaccggcgtagcatcagcaggcagcgcggcaagacgatcacggcatacagcaatcatcgcctctacggatgggccaggaatggtcagcgcagaattgaaccggtagagcggcttgtagatttccttcttgatgtgttcgttgtccacaaaggcgatgccggtcaccgaatagctgaacatgtcgtgcggctcgggcgcaaagccggtcatcaccacggaatcaaaggaatcgatggtggtttcgagttcggtctctggctgaatcttcacttcgacgtcaatcacttgctggcgcggaccggtggccggtatgcagcgcaactggaacctgtggtcggtgaccggcgagctgaaggacagcttcatctcatagtcgaacacgagttttttcacgacgtctcctgcacaatactcacgcaccggcggccggcacatctcgggatagcagcactacagatacagtggccgccgcacccgctcgcaaaaaatgtagcgagcgcatacggcttgaagccataccaccataccattgcaacctgtcaggggcgcttggcatccatgttcatggagctgagcgagcccatgtccttgatggccaaagcgctgactctgccggaataatcgtcaaggtacttcttcagagaatcggccacctcctgatatccgcgagacggcagctggccgacaagccagctcagtccgtcggcgaaacagctcggcaacggcataccgtcgagaatcatcgaataggaggccagcttcttcagcggggcttccatttcttccatcgtgagcccaaaacgggtgtacaaatcgatgcgttccagatacttgccgatgaagataaaggcctttagcgtgggatcgactggcgaattctcgatgccgccccagaaggcgagcatgtcatcggtgatgtctcgctggttgtagatgtcctcggcatcggccgcatgcttggcggcatctgtaatgttggtcatcgccagttcgacgtattgcagcagtcgggagctcagttccgggcgcagaatcacggcattgttgaacgcggaggtaactgcggaacgcacggagtccgggttcgagccgtcgtacaggaagctttccacgaacccatcaaagtcctcgaagtcctcgggcagatcgagggcatgagcgaagggccggaaggcgtctacatcagtgtccatcacacggtcatagaacgggaagaactggttcagggtggtgaaggcacgttcggtgtatcggcccaaccaatacaggttgtccgctttagaagcggtgaccaaggccagcgaatggtgacgcgactgactcagcaggttcgccacctgcacctcggtaccgtattcgtgttccactccggtctccggcgccaacacccacgtatccttgaatccaccgccctgcgacgagttgacgatcatctggccaggcacggacgaataacgggtcaggcccgaataccacacatgcgtgttcttgccggtcaccacgaaggcgcgcaaatcgcatttgcgcggcgacatttcgccggtcttcggatcgaccacgtcgatatcgcggaactgaatgacctcctgtgcaatgaatcgacgtggctcctccttaatgcggtcggccaattcctcacgtgcggcggcatccagcgacgagccgaataccacaccatagccgccggcctcggccacatccttaatcaccagctcgcccatacgattcaggacttccttacggtcggcctcaaacataggcatgtaggtgggagcgttgtggaggatgggctcttcgccgagatagtacttaatcatctgcggcacgaagtagtagatggccttgtcgtcggccgcgccgttaccgggagcattgacgatagccacattgccggcacggtaggcggacaggagcccgggcacaccaatcacggagtcggggttgaaggagaacggatcgaggaactcgtcggagagacggcggtagaccacgcccacacggtgacgcttgccggcgtaatccaagaaatagaccttgttgtccaccacttcaaggtcttcagggaaggcaagtgcggcaccggttttctcagccaagtaggcatgttcgaagaacgcggaattgtatcggcctggcgtgaggaccacggcgataccttcagtagagacgaaatccatggctttgcgcagtagacgcggatattcacggttgtctcggatacgcacgtcacggaacagtcgtggagagatacggcgttcgatatcgcgtacgaacagcgggtagctggcaccggacggaatacgcaggttgtcttccagcacccaccagcggccgtcctcaccctggaccaaatcctcaccggcgatatgcgcgaaaatgccaccgggaggggtcacaccgttgacctgcgggaagtatccgacagacgtgtagacgtattcctccggcaccacaccgtcatgaatgatggccttgtccgaatagatgtctttcaggtaggcgttgagtgcgttgacacgctgcttcaggcctttctcaagctcatcaaactcgtcggattcgataatgcgtggcacaggatcgtatggaaacaaacggtcgtggtattcgccgttcttgtagatgccgaagcgcacgccgttgcgggacagctcacggttgattgcctcacggcgattcaccatttcgtgagccagccggcgtgccgcggattcaatcatcgtacctgctccttgctctgacggctgcaggcttgccatgcttgaggcgcacgctgacgccgcaagccgcaaccgggtttgatggtttcaacctaggcggcacccgtttcagcaaatgtgcgggtttgttacgggcaggtcacttgcaggtccatgaaatctacaaagtacgtacggcacgaatggcttcggcacgagcagccaactggtcatccgccggatattcgatatgttccagagtcagcccttgcggtgcgattggcccgcttgacccctctcgcaccggattggccatcttgtccgcaaaccattccagcgttttgcgccccgaaccaaccttgatcgaggaaccgaccagcgaacgaaccatattgcgagcaaaagcatcggccacaatcgtgaatacaaccaagccggattccagcgacggcgtccggtatgcctcgttctcagccaatacgtctggcaccaacgaggcaaccggcactcggcgccagtaggccgtcttgacttcacgaatcgtggtaccacccggattcggcgtggcaaacgaaccaaaatcatgcaggccaatggtcatggcggcagcggcattcatcgcatccaaatccagcgactcatccacgcgcagtacacagccgcgcagccgggggtccacttcggatgaacggtcggcaacacggtacacatacgtgcgctccaacgcggagaaccgcgcatcgaatccctgcggcgcaatggcgatgctgtgaatcacaatgtcagcaggcaacacggccttaagcctgcgagccaatgcttcggtcagcggcacatccatatgcccctggcaacgagcaagtgtttcatcagacacatccagatgcgccacctgatgcgaagcgtgcacaccggtatccgtacgaccggccacagtcagtcgcagcggctctctctcgtcaccgaccggcacacgcagcaccttgtgcaacgcatcctcgatagttccctgcaccgtgcgcagctcaggctgcttggcccagccgtagaatccgccgccgtcataggcaaggtcgatgcgtagtcgtgtcatagtccatcatcttaatgatcacgatgataattcgacttttgatgcgatgccggcatacagagacgaaccagcatacagagacgaaccggctatggtcgaataacgcaaagggctggaacccaaatggattccagccctttaagctagctatgcgacctagcggtcagctcactcggccttctcggcttcagcggcttcctcagcaggagcctcagcctcagcggcagcggtctcctcgaccggagcctcagcagcttcagcagcctcggtctcgacggccggagcctcttcctcggcaaccttagtggcagcctcggcttccttcacgacagccttcttggcaaccggctcggtgacgagctcgatgatggcggccggagcgttatcgccaacgcgcggagcgatcttgacgatacgagtgtagccaccttcacgctgctccatctgctcagcgatctgggtgaacagaatgtgcaccacagacttgttgcggatgacgcgcatcacgcgacggcgagagtgcagatcaccgcgcttggcgaaggtgatcaggcgctcagccagcggacgaagacgcttggccttcggcagcgtggtggtgatttggccattctggaacaggctggtcgccatgtttgccagcatgaggcgctcgtgcgcagggctggaagccagacgcgggcccttcttaggtgtaggcatgggtttactccttattgtccgaagcaggcaagcaggtgggcatgtgcccgagcatccgcttgccgtgcgaacagacggttaatcaaaagcgacgaatcactcgtcttccggcgagaagaaggtgccgccttcgaggttattggtgtcgaaggccatcggcgaagacttgaggctcagacccagagtctgcagcttctccttgacttcgtcaatcgacttcataccgaaattgcggatgtcgagcagatcctgctcggtgtgggagacgagctcaccgatggtgtggacaccctcacgcttgaggcagttgtaagaacgctgcgtcaggttgagatcctcaatcgggacggccatctcggggttggtctcctcggccaccggggccggaccgacctcgacgccttcggcctgggcattgagctcgcggcacaggccgaagagctcaaccagggtcgaaccggcggaagccaccgcatcacgcggggagatggcgggcttggtctccacgtccagaatgagcttgtcgaagtccgtgcgctgttccacacgggtggcctcgaccttgtagctcaccttgagcaccggggagtagatggaatcgaccggaatacggccaatctcatcggtgtcctgcttgttcatctgggcaggcacgtagccacggccacgctcaacggtgaactcgatctcgagttcgccgtcctcggcgagggtagcgatgtgctgctccggattggcaatggtgacgccagacggcggggtgatgtccccggcagtagcctcgcccttgccgctcttgcgcaggtacatgaccacaggctcgtcatactcgctggtgagcacgatgcccttgatgttgagcaggatctcggtgacgtcttcctgaacacccggcagagtggtgaactcatgcagggctccggagatacgcacggaggtcacggcagcacccgggatcgaactcagcagcgtgcgacgcaacgagttaccgagcgtgtagccgaagccaggctcgagaggctcgatggtgaagcgagagcgctgcggattcagagattcctcggtcagagtcggacgctgtgcaataagcactgtggttatcctttcagcttgaactcggtggtgcactcaccggctaagcggttttggatggattggtattgctgagtgctcagacgcgacgacgcttcggaggacgaacgccgttgtgggcttgcggggtgacgtcggtgatggaaccgacctcgaggcccgcggactgcagggagcggatagcggtttcacgaccggaacccgggcccttgacgaacacgtcgaccttcttgacaccgtgctccatcgccttgcgggcggcggactcggcagccataccagcggcgtacggagtggacttacgggagcccttgaaaccgacgtcgccaccggatgcccaggacaccacggcgccagacggatcggtgatcgagatgatcgtgttgttgaaagtggacttgatgtgagcctggccgaccgggaccgacttgcggtcacgacgacggggcttacgagcggcttgcttaggcgctgccattgaccctcgtttcctagtaacgaacttatttgttgacgtccgaacgatgggatggaactcatcccgtggctcggagcatgccacctattacttggtggccttcttctttccggcgaccgtacgcttcgggcccttgcgggtacgggcgttggtcttggtgcgctgaccgcgcacaggaagtcccttacggtgacgctggccttggtagcagttgatctgaatcttgcgacgaatatctgcatcgacttcacgacgcaggtcaccctcgatcttgtagttagcttcgaggtagtcacgcagcgtgatcagctgctcgtcggtaagatccttgacgcggatgtccgggttaataccggtcgcggcaagcgtttccttggcacgagtacgaccaacaccgaaaatgtaggtgagggcgatctcgatgcgcttctcattggggatgtcgactccggcaagacgtgccattgcgattccttcttgttgccgtaggtcttgcacccactcgtccggtctcccggcacgggcctacgtacccgtggttcagtgtcgttcccttgcgggaagcactgtgagagagtgccttatttacttagtgccgctggagaatctgctctcagccctgacgctgcttgtggcgggggttgacgcagatcaccatgacgcggccgtgacggcggatcacgcggcagttttcgcagatcctcttcacgctagggctgaccttcatggttatccttttcttgtgtacctttacttgtagcggtacgtaatgcgtccgcggttcaggtcgtaagggctcatttccagcacgacacggtcctgcggcaggatgcgaatgtaattcttacgcatcttgccggaaatcgtggcgagcacgatgtgcttgttctcgagttcgacgcggaacatcgcgttgggcagtgcttccactacctgtccttcgacctcaatcacaccgtcttttgccatgcgcctctagtcctattccgttggatgattactgtggcatatccgaagacacaccaactgtcaactatatacgcatatacccctatgcgacactcggcgtgtcgcataggggtatgtgcgaaatgttgtggtagccgctaggcttgccgcctctactgcaggtggctgatgatgcggcggctgatctcgtcgatgtcgccgacaccgttgaccacgaccagcagaccgcgggactcgtagatgtcgagcagcggggcggtttccttctcgtaggtttccaaacgcttggcgatggcctccggggtgtcatcagcacgaccctgctcggcggcacgcttcttcatgcgctccagcagcacgtcacgggcggcttcgagagccaccacgtggtcgagcggagtgccgagatcggccagcatttcgtcaagtgcggtgacctgggcggcgttgcgcgggtagccatcaagaatccagccgttggcacagtcttctttggccagacgatccttgacgatcttgttggtcagggaatccggaaccagctcgcccttatcggtgtagctcatcgcttcaagaccgagttcggtcttgttcttgatgttgtagcggaagatatcgccggtggagatggtggggatgttgaagtgctcagcgagcagcgcagcctgggtgcctttgcccacgccttgaggtcccatgatgagcagacgcatggtggtctccttttatgttgaaaattaatacggctttggctcccttgttaagggaaccattgagttatatgtgggaggaaacggatggctccgtcagtcgacagcccacagggctgtctccttcctcgcgctaacgcttgctgagcgggcgtcagccttccttatgatccacgttctcgagcaggaagccggtgtactggaactgctcggtctgggccttggcctgacgcagggtgtcgaggccgacaccggcgataatcaggatggtggtaccaccgaacggcagcttggcattgagtccgagggccatgatgagcacggtcggaatcagagccacgaacagcaggtagacggcaccgacggtgttgagtcggttcatcacgtaggtcaggtagcggctggtggcgttgccggcgcggatgccggggatgaagccgccgtactgcttcatgttgtctgcggtctcgtccgggttgaacgtgatcgaggtgtagaagaagcagaagaacacaatcatcagggcatacagcgcgatgtaccacaccgaagtggtgttcgcgagattgctgttgatccacttgacccaagactggtcggacttgccgaactgagcgatcagggtcgggatggccagaatcgaggaggcgaagatgggcggaataacgccggacatattgatcttgagcggcaggtaggtggaggagccaccgtacatcttgcggccaatcatgcgtcgggtgtactgcaccggcacgcggcgctggcacagttccacgaagtcaacgaagatgaggatgaccacgagcacacccacaacgatgccgaacttcagccaatcgccatcagtgccgttggtgccgtagccaatctcccacagctgcggcaggaagccggagcatatggacatgaagatcaagatggacatgccctggccgatgcccttgtcggtcacaagctcggccatccacatgatcaggccggtgccgccggtcatgatcagcaccatgaccacgaggttccacacggagccgtccggaatgacctggtcacacttgtagttgaacagggcgccggagcgagcggtgaccaaaatggtggtggactggagtacagccaaaccaatggtcaggtaacgggtgtactgggtgagcttggcctcaccggactgaccctccttgtgcagggcctcgaagcgcggaataaccacacgcagcagctgcacaacgatggatgcggtgatgtacggcatgacgcccagcgcgaagatggacagctgaagcatagcgccaccagagaagaggttcaccaatccgatgaagttctcctgtgaggcgctaccaatggtggccatgcacttgttcaccacgttgtagtccacgcccggcgtcggaatgaacgaaccgatgcggtagacgatgatgatgaacaggacgaagagaatcttcttcctcagctctttggtcttcagggcctggattagtgtcctcacctgggtttcctcccactagcgcgcactcgacgcgcgaaatacacaaactatcgaacgagcatagtctaacgtgcctacttcagacaactgtgcgtctcgtcaatgcttgctgaatatgactttatggagaacgcatctccccgaaaatcgggtattgtatcggcgccagcgaatgtaggacttgatgctgagaccgcatcactgcacgcggaacgccatcaatgatctcgataggtcatagtgatagcagtgcccccgaccaccagataggcggacgggggcacagagctatattcagcgtttcgcgcggactaatcagtcctcaacgacggagccgccggcagcttcgatcttggacttggcggaagccgaggccttgacacccttgagggtgaatgccacggtggtttcgccttcgcccagaaccttgaccggagcgttgccacggacgacgcccttggcaaccagatcctcggcagtcacttcgccgccctgagggaagacctcaacgagacgagcaatgttgaccacctggaactccacacggaacgggttcttgaagccacggagcttcggcaggcgcatgtacagcggcagctggccaccttcgaagccaggacgcacgtgagtgcgcttggtctggcccttggcgccacgaccggaagtcttgcccttggagccttcaccgcgacccacgcgggtgcggtccttcttggcgcccggggcgggcttcaaatcgtgcatctgcaggatttcgttatctgccataatcagtcaacctcctcgacggtgaccaggtgacgcacggcgttcaccagaccacggttggccggggtatcctcgcggatcacggtcttgccgatcttgttcaggccgagggtcttgacggtggcgcgctgagccggagtacggttcacgatgccgtggtgcagggtaatcttcaggttcttagccatgagtatcactcaccatccttctcttcagcggccttcttggcagcctcttcacgagccttgcgagcctcatcgataccagcggcacgagcgcgcagcagggcatcgggagcgacctcgttgagggccagaccacgacgggcggcgatctcctcgggctcttcgagctgcttgagagcgtcgacggtagcgcgcaccacgttaacggcggtggcggagcccatcgacttggtcaggacgtcggtgatgcctgcgcattccatgacggcgcgcacggagccaccggcgattacaccggtacccggggcagcaggacgcagcagaacagtgccggcggcgtcgtgaccctgaaccgggtgggtgatggtgccacggacgcgaggcacagagaacatgtgcttcttggcgtccagctggcccttggcgatggcggccgggacttcacgggacttgccgtagccgacacccacggtgccgttaccgtcgcccactaccacgagagcagcgaagctgaaggtacgaccacccttgtgggtcttggacacacggttgatggtcaccacgcgatcgagcagttcgtcgccgcggttttcctcacgacggttacgacgctcgccacgacggccttcaccgcgctggccacgacgacccttgcggtcctcgttgttggattcggtcgccacagtgttctgagtttcttcagccacttgggtttccttagtttcgttgtcgctcacagtgcaagacctccctcgcgggcgccatcagcaacggctgcgacgcgaccggtgtacttgttgccaccgcggtcgaaaacgacctcggtgatgccggcagccttggccttatcggcgatcagctcgccgaccttcttggcggcctcggtcttggtgcccttgaaaccggcaaagtcggcctgcagggtggaggcggacacgagagtcacgcccttggtgtcgtcgaccacctgagcaaccatgtgacggttggaacgggtgaccaccaggcgcggacgctcggcggtaccggagatgcgtttgcggatacgcacgtgacggcgcttgagagcaaccttcttgccttttccgagaatagctacgctcatatcacttaccagcctttccagccttgcgcaggatgcgctcatcggcgtacttgacgcccttgcccttgtagggttccggagcgcgcagcttgcggatgttggcggcgacctggcccacagcctgcttgtcgatgccctcgacaaccacgtggttggcgtcggtcaccttgaaggtgataccttcgggcgggttgacggtgatggtgtgggagtagccgaggaagaactcgatgccctgacccttggcgacggcgcggtaaccggtgccgacgatctcaagagtcttggagtagccatcgtgcacacccttgaccatgccggccatgatggaacgagccagaccgtgcttggcacgggtcggacgcaggtcatcagccggggtaacgatgatctcgttgccctcaacggcagcggtgatgccttccggaatcacgtaggaatcagaacccttggcgcccttggccgagaagttctgaccttcaatcttgacttcaacgccagcggggatggcgatggggagcttaccaatatgcgatgccatgtttcagctctcctttctcaccacacgaaggcgacaatctcgccgccaatgcctcgatcgaggcattccttctgagtcagcagtcccgaggaagtcgagatgatggcgatacccaggccaccgagcggcatcggcagggagtcggacttcgcgtaacgacgaaggcccggcttggagatgcgcttgatgccctgaatggaacgctcaccgttcggaccgtacttgagggtgacctcaagagtctggccgaccttggcttccttagcggtgaagtccttgatgtagccttcgcgcttcaggatctcggcgatgttcgccttgaacttggagtacggcatatccacggtctcgtgctttgccgcgctcgcattacgcagacgcgtaagcatgtctgcgatcggatctgtcattgtcatttgggcttgttgccctttctcgctatggtttccgccgccctcacgcttcttctagaagcggttgggccgcggaccttcagcgtcgatgtttaccaactggacttcgtaacgccgggcagttcaccgcggtgagccttctcacgaaggcagatgcggcacaggccgaacttgcggtagacggagtggggacgaccgcagacctggcagcgcgtgtaagcgcgcaccttgaacttcggcttgccggccgccttgttcttaagagcggtttttgccatatcagttctccttgaaggggaagccgaggtgcttcaagagcgcgtaagcttccgtgtcgtccttggtggaggtcaccacagtgatgtccataccgcgcacgtgatcgatcgaatcaggatcgatctcgtggaacatggactgctcggtgagaccaaagttgtagttgccctggccatcgaactggtggccgttgataccgcggaagtcgcggatacggggcagcgcaagggtcagcagacgatccaggaactcccacatacggtcgccgcgcagggtgacgtatgcaccgatggcctggccttcacgcaggtggaactgcgcaacggacttcttggccttggtgatcttcggcttctggccggtaatcagggtgagatccttgacggcgccttcgatgagcttggagtcgcgagctgcggcaccgacgcccatggagacgacgaccttctgcacacgagcaacctgcatcgggttggagtacttgaactccttctcgagctcagggacgatctgctcgttgtacttgaccttcaagcgcggggtggccggcgcttcgacagtagtatcggtcatgccagctcctttccggacttcttggcgacgcgtacacgcacggccttgaccttgccgtcacgcgcctcttccttaacagtgatgcccacgcgggtcggctgcttggtctccgggtcgatgaccatcacgttggagcgatggatcggagcctcagtggagacgatgccagcctgctggccctgctgcgtggcgcgcacgtgcttcttgacgatctgcacgccttcgacgatcagtcggtcgttgtccagcacctgcttgacagtgccttccttaccgcgatccttgccgcgaatgaccttgaccaggtcgccgctcttaatcttggctgccatgtcagatcacctccggggcgagggacacgatcttcatgaacttgtgctcacgcagttcacgaccaaccggtccgaagatacgagtgcccttcggttcacggccggagccgagaataacggcggcgttctcgtcgaacttgatgtaggaaccatccgcacggcgggattccttgacggtacggacgacaacggccttcaccacgtcgcccttcttgaccgacccgccaggaatggcgtccttgacggaggcgacgatcacgtcgccgatgccggcatagcgtcgcttcgatccgccgagcacgcggatggcgaggagttccttcgcacccgtgttgtcggcgacatgaagccgcgtttcctgctgaatcattgattctccttagccgagctggttctccccatttaccggggcaccttggtcttccgaggtgccccggtaaatggcgagccttgccgaactttacttacttggcgcgctcgataatggattcgagacgccagcgcttggtcttgctcagaggccgagtttccataatactcacgaggtcgccaatgtgggcgtcgttgtgttcatcatgggccttgaccttgctggtggaacgaacgaccttgccatacagcgggtgggtcgaacgctgctcgagctcgacggtaatcgtcttgtccatcttgtcggacacgacgtagccgcggcgaaccttacggaagttacgctcttcagccataatcacttctccttggattcggtagcggccggctcctggctgatgccaagctcacgttcgcgcagcacagtgtacatgcgagcgatgtcgctcttgacagccttgagacgggcggtgttctcgagctgaccagtggcgtgctggaagcgcaggttgaacagctcttccttggacttcttgaggaagccttcgatttccgcgttggtcttctcgttgagattcttgatggagtaatcagcggtaccgactgccatcagatatcaccaccttcacgtgcgataatgcggcacttcatcgggagcttgtcgatagcacgacggagggcttcgcgagcgacgtcctcagacacaccaccgatctcgaacatcacgcgaccagggcggacgttcgcgatccagaactccggggcgcccttaccggaacccattcgggcgccgagcgggtgcttggtcaacggacgatccgggaagatcgtgatccacacgcggccaccacgcttaatgtagcgggtcatggcgatacgtgcggcctcgatctgacgattggtcacgtaggccggggcaagagcctggatgccgaaatcaccgaagttgatctcgttgccgcccttggacatgccagaacgcacggggcggtgctgcttgcggtacttagtcctcttggggataagcattcttgctcactccttcgtttctgcagcggcagtggcctcggcaggagcctcggccttgggggcctgagcattctgctgagcggcggaacggttgccacggcgcgggcggcgatcgccacgacggcccggacggttgttctgctgagcctgctgctcttcgaactcggattcggtcatatcgcccttgtagatccacaccttgacgccgatgcggccgtaggtggtcttggcctcgaagaagccgtaatcgatgagggcacggagggtctgcagcggaacgcggccctcgcgatagaactcggaacggctcatttccgcaccgccgaggcggccggagagcttgatgcggatacccttggcaccagcgtgcatggcgtcctgctgagccttgcgcatggcacgacggaaggtgacgcggttggtcaactgctcggcgatgccctgagcgacgagctgggcgtccagcgcggcgttcttgacttcgaagatgttgagctgaacctgcttgccggtcaacttctccagcttggcgcgaacgcgctcagcctcggcgccacgacgaccgatcacaatgcccggacgggcggtgtgaatgtccacgcggacacggtcacgggtgcgctcgatgacgatgcgggacacgcctgcgcgctcgagatccttgctcatttccttacggatctgatcgtcctcgagaacgaagtcgcggtagcgttcgccggccttgttggagtcagagaaccacttggaacggtgattctcggtgatgcccaggcggtagccaaacggattgatcttctgacccatctttagcgggctccttccttggtagcaacaacgaccgtgatgtgggaggtgcgcttgttgatacgagcggcgcggccctgggcacgagcgcggaagcgcttgagggtcacaccttcgtcaacgaaggtctccttgatgaacaggtcgttctcgcggaacggctcgccggccttgtcggccttcacgcgggcgttggcaatggcgctctccagggtcttgcggaccggaagggccgcagcctgaggggcgaacttcaaaatggtgacggcgtcggtggccttcttgccgcggatgaggtcgaccatgcggcgagccttgcgcggcgtcacgcggacgtgacgagcgattgctttagcttccatgttctattccttatccttagcggcgggctttcttgtcgtccttcacgtgacccttgaaggtcttcgtgggggcgaactcacccagcttgtgaccaaccatggcctcggtgacgaacaccgggacatgcttgcgaccatcgtgaacggcgaaggtgtgtccgatgaaatcaggggtgatcatcgaacgacgggaccatgtcttgatgacgttcttggtgcccttctcgttctgctcgtcgactttcttctgcaagtgggcgtcgacgaaggggcccttcttgatgctacgagtcatcttctcgatactcccttacttgcggttcttgccggacggacgacgacgaacaatcatcttgttcgaagccttcttcggacgacgagtacgaacttcgcccttgccccacggagaaaccggcggcttaccaccgcgggtacgaccgccgtgcgggtggtcgaccgggttcatggactcaccacgggtgaccggacgcttgccgatccaacgggcgcgaccggccttgccgagctgcacgttggcgtggtcttcgttgccgacctcaccaacggtggcgcggcagcgggcgtcgacgttacggatttcgccggacggcatacgcagctgggcgtaagcgccatccttggcgacgagctgaacggcagcaccagcggagcgagcaatcttggcgccacccagcgggcggagctcaatcgcgtgaaccacggtaccggtcgggatgttcttcagcggcaggttgttgcccggcttgatatcagcctgagcaccagtctcgatgacgtcgccctgcttaacacccttcggcgcgatgatgtagcgcttctcgccatctgcgaagtgcaggagggcgatacgggcggaacggttcggatcgtattcgatctcggcgaccttggcgggcacgccgtccttgtcccaacgcttgaagtcgatgagacggtactggcgcttgtgaccaccaccgcggtgacgggaggtgatacggccgtaagagttacgaccgccggtcttggagttcttgcgaaccagcgacttctcaggcgtggagcgcgtcagatcggagaaatccgagacggacgcgttgcggcgacctgcggacgtcggcttgtaaacgcggatagccataatatagttcttcctttaacttttctcggctagccttcagttgccaaagatgtcgatcgtctggccctcggcgacggtcacgatcgcgcgcttctgggaagcacgctggccgaaaccggtgcgggtgcgctgcttcttgccagcgcggttgagggtgttgacgttcgtcaccttgaccttgaagatctcttcaattgcctgcttgatctgcaccttgttcgcgtccttggccaccacgaaggtgtactggccacggtcggaaagggcgtagctcttctcagagacgacgggcttcaaaatcacgtcgtgcgcgggcttgtgaatagcgaccatctaaatcaggcctccttcggctcggtcttggcagccacgaaagcttcgaaagcttccttggtgaagaccacgtactgagcggtgatcacgtcgtacgtgttgagctgatcgacgaaaatcgggtgaacggtcgggatgttgcgcacggagagccactcgttgatgttgtcacgagtgaagacgaccgtggtgaacttgtcctcggtgatcgggctcagggcggcgacagcagccttggtggacggctcggtgataccgaagtccacaacggcgatgcggccggcgttggcgcgatcagacagggcgtagcgcagagctgcggccttcatcttcttgggggtgcgctgggagtagtcgcgcggctgcgggccgaacacgacaccaccgtggtaccactgcggagcgcggatggagccctgacgagcacgaccggtgcccttctgcttccacggcttcttgccgccgccggaaaccatgccacgagtcttggtggcgtgggtgccctgacgggcagcagcgagctgagcggtaacaacctggtgaatcagcgggatgtgagccttgacgtcttcagcggaaacaccgaagagttcaaccggagcctcgacggtaccggcggcctggcccttggcgtcagtgacgttcagagtaacgtttgccatggtttatcaggctcccttcacagccgaacggacgagaacgatgccgcccttggggccaggaatggcgcccttgatggcgatgatgccgttctcgacatcagcggagacgacggtcaggttctgggtagtggcggtcacatgacccatgcggccggccatacgcttgcccttgagaatacggctcggagtggcgcatgcgcccacagagccaggacggcgctcgttcttgtgagagccgtgagtacggcggtaggacttgaagccccaacgcttgatagtgccggcgaagcccttacccttggtagtgccggtcacgtcgacctcagtgccctcttcgaacaggtcggcggccagttcctggccagcctcgaactgatcgacgtcgtcggtgcgcacctcaacgaggtggcgacgcggggtgacaccagccttggcaaagtggccagccagcggcttggtcaccttggtcgggtcgatggcgccgtagccgagctggacagccttgtagccgtcggattcctcggtcttcacggcagtcaccacattggtggacacgtcgacaagagtaacgggcacgaagaagccgttctcgtcccacacctgggacatgccgagcttcttgcccagcagagccttgcgattagacataatgcttcctcctcccttacagcttgatttcgatgttgacatccgcaggcaaatcgatgtgcatcagggagtccacggccttgggggtcgggtccacgatgtcgatgaggcgcttgtgagtgcgcatctcgaagtgctcgcgagaatccttgtacttgtgaggagaacggataacacagaagacgttcttctcggtcggcagcggaacggggccaactacagttgcgcccgcgttcgtcaccgtttcgacgattttcttcgccgattggtcgatgacctcatggtcataggacttaagcctgatgcggattttctgtcccgccattgccgtccgccctttctagcgatgttcgttgtactgtttaccaacctgcttcttcagggcaccggcgcgcatggcctcccttggacatacgtcctctggcggtcatccgacatcagtgcgcggtctccgtttgccacctacaagaagtggttcccggcccgcgctcgctttttcaattccaatttgcgagcccaaatcaggcaacttgtttattcaaccatcgaggcgggacactggaatccgcgcgtgtcgcgtgctcgcgccgaccatactctcataaaccatcaaaaaagattacttgactcgatacgaataggttggcgattgcgggtgaacggccaattgcagaaaccgggaatcgtctgctcgtacacacgtgtcataaatcacgcaccaaatatgaacgttcggattgtgacgtacagcactgggcgttacgctaagcgacgtgacacaatcactggcaaaaaacatcaaacccattcacgaacatggcgcaaacgtgctgtaccaacatggcaccctggccctactggtaccaggcctgctggaaggcaccaccaccatcggcgagctgctcaagcacggtgatacgggtatcggcaccggcgaagggctcgacggcgagctcattatcttggatggggtcgcatataaggtcggccaatccggtgtggccgagcgcgtgccagatgatttcacgatgccatttgccaacagccatagggcggcattccagtatcagtgcgaacgcgaagatattggtcttgaggaactgaacaagaaaatcgttgaggccaacggtcgcgcgaacaccttcttctcggtggtggtgcgcggcacgttcagtttcatcaagacccgcgcggtcatcaagcaacaggcaccctaccccacgttggtggaagtggccgatcgacaggccgtgttcctgcgccacgatgtcaaaggcaccatgctcggatacttctcccctgtgatgtttcatggtgctgccgtggccggattccatgagcattttctgtccgacgaccacacgttcggcgggcatgtgcttgatgcggtactccaacgaggcaaaatctacagtcaggtattcgacaccctagtacagcatctgccggtggatgatcccggataccgcaatcatgatttcagccaggatccgattgctgaggccatctccagtgccgaaggcgacattcgtccacacaacgaatgattgcccggccaatagtccaagcccactcccccatagctggcggcattggccctcggcactttctgggacgaaacgaatgttccccactccccgtggccggcggcattgacttggattgcgaatgattgccaagccaataggctcggctgcccccacagcctgcggcatttactcgtatcgcaaatgatttccgcaagaacagcgcgaatccaactcatattcttcggataaccgcgcataccgcgcgcacgcctgaaatcggattcccacactgccggtattcggttaacacgttattagtctcacattgctcttacctagaaccggccgctacgatactattgccagctatgacggcacaacgcacgacccgcagacgtgattggtttgacaatcagcccggcgcatgggtgatggttatgctgcccgcagcggcaggctccattatcggtggtcctaatctcgatacgctctggctattggcgatttgggctttgtgctattgcgtgcagttcagcgctgcgcactggttcaaggcacacttctcgcaccgctatctgccaccgatgattgcctataccgtggcacttaccgtaattggcctgccattcctgattacgcataccggcatactgcgctgggctcctttatatatagtgctggtcgcgctatcaatgctgtcctcgtggttgaggaaggagcgctcgctgtggggcaatgcggtatcggtgattgccgcgtcgacgatggccacggtaatcgcgtcattcggcagcgctgccaagacggcatgtgctattcctctcaacgcggcgcaagcctcgtgcggagccgatacagacgccgcacgtgccatgattcggaatatgccgggattcagccagatatttgaaccccgtgcctggtggcccgctggttctttgcccatgaacgggctgattgccactgcgctgttcgcactcatgcaatacggctcggtattggtggtcaaaaccatgattcgagaacgtgggaagcgttcgtacgtggcagcatcgtgggtatggcatgtgatgttggtggcgctgaccatagtggcagggcataatccgttcctcataacaatgagcgtgctgctactggcccgtgccatcgccctgcctgtggccgctcggtgccgaaccatgaaacctgtggtaactggtattaccgaagcattcgccagtcttattgcttttggctgcattcttgcggcggtgttgatgtaataccgcctatgcatagggcctccaccgcgcggtgggaaatacacgtcgcggtggcgctccaaaggctttccatcacatagcaaaatacacaacatacgacaaagagcccggccccggaatggggtcggactcctgttacgcggtcatgaaaccgtttggtctcatatcactaatggcacatggccattagactcttgcaatcagcgctcggaggcttcctcagtggcggcctcgccttcgcgctcgatgcgcagcttgtggccttcctcctgggagacgccgtagtaggcaccgacggcgatgtccttcatgtcgttaatcagcgggatgcgtgggttagccggggtgcactgatcctcgtaggcacgcatgccgatctgatcaagcacggaccagaagtaatcctcatccacgccgcaatcctggaagctcttgttcatgccgagcttgttgtcgcggtaatcctcgacggccttagccaggttctccacggcttcggccggggtcttgccggtgtcgatgccgagattgcgggcgatgtcctggtagcgctccggagcgacgtacttgttgtacttcggccaagaggtgggctcctcaggaatctggccgttgtaacgaatcacatacggcagcaggatggagttggtacggccgtgggcgatgtggcacagagcaccgatggtgtgggccatgccgtggcacatgccaaggaacgcggagccgaacgccatgccggccatggtggcggcgttgtgcatcttctcctgggcgtcggtcttggccaggccgggctcgccgttgacggactcagccaggttgtcccagatgagcttggcagcgtgcagcgccatgccgtcggtgaagtcgttcgcgtacacggacacgtaggcttccatcgagtgggtcagggcgtcgaagccggcgtcggaggccagcttgcgcggctgggtgcgggccagcaccggatccacgatggccacggacggggtcagggcgtagtcggtgatcgggtacttgtagccggtcttgtggtcggtgatcacagcgaacggcgtgacttcggaaccggtgccggaggaagtcggtatgcacaccagcttggccttcttgcccagcggcggaatcttgaaggcgcgcttacggatatcgaagaacttctcgcgcacatcggagaaggcgatttccgggtgctcgtagagcaaccacatgatcttggaggcgtccatcggggagccgccgccgaccgcgatgatcgtgtccggctcgaactcgtcgcgcatcatggccgcacccttttcgacggtctcgacggagggctccggctcgacgtagtcgatgatgcggaaggtcacgcggttggaacgggcacgcagctggtcgatgatcttgtcgacgatgccgagctgctccatgaccttatcgcagacgatgacggccttctcgatgccgtacatgtcgcgcaggtacttgatggcgttcggctcgaagtaggtcttggccgggatcttgaaccactgcatgttgttgttcctccgagcaatgcgcttgatgttgacgaggttcacggcctgtacgttgccggaaaccgagttgccgccgtaggagccgcagccgagggtcagggacggggcgatggcgttgtagatatcaccgatgccgccgagagaggaaggctggttccagatgatgcggcaggcgtgcatacgaacaccgtactcgcgcacgagctcctggttgttggtgtggatggcggcggtgtggccggcacccagcttgagcatcttctcgcacatctcgaaggcctgctccttgttatcggccttgaggacggcctgcaccggagcgagcttctcgtgggtcagcggctcatcgtcagagacttccttgcactccgcggcgaggatggtggcatcctcaggaatgtcgaagccggcggccttggcgatgaactgcggggacttgcccggcaccacggagttcagcaccggcttttcaccggaaccggccacgcagccgaacatgtacttctcgagcttggccttctcttcggcattgacgaagtaggccttgcgcagcttgagttccttgatgagcggggcgtagacgtccttgtgggcgatgatggcctgctcggtggcgcagatcatgccgtaatcgaagtgcttggagagcaccaggtcgttggcggcgcgcacgatgtccacgtccttgtcgacgtaggccggcgcgttgccggcgcccacgcccaaggcgggcttgccggaggagtatgcggccttgaccatgcccggaccgccggtcgcgaggatggtggcgatgccgtcgtgcttcatcagtgcgccggtcgcctcgatggaggggtgctcgatccactggatgcagttctcgggggcgcccgcctcgatggcggcgtcgcgcacgatcttggctgctgcgacggaacagttctgggcgccggggtggaagccgaagatgatcgggcagcgggtcttcaatgcgatcagggacttgaagatggcggtggaggtcgggttggtgaccggggtgacgccggcgaccacgccgaccggttcggcaacttcatcgatgccgagcacgtcatcttcgcggatgatgccgacggtcttctgaccagccaggtagttggtgatgtgctcgcaggcgaagatgttcttggtcgccttgtcttccaccaggccacggtgcgtttcgtcgacggccattttggcgagcacgagatgcttgttcagcgccgccacggaggccttggcgacgatgtggtcgacctgcttctggtcgagcttttcgaattcgacgagagcctgctggcccttggctacgagtgcgtccacttcagcttcggctgcggcaagcttttcttccggagtcggcttcgttgcgctgttcttagtttctgccactgtaggatcctcctctaatagagatctggaacgtggtgcgttattccttattgctgattgccgttgtgcaacagtcacgtcacgacgcttcatggcactgaatcgcctgtgacctgcatcacaatatacatgacccattgcatcttttcatcccttaagcgagttgtgcgtttcgtgttatattccgtgtgcttaatgttcaaacaaggattatttttgcacgaaactctgttcactctctcctaattgtaaccttttgttcattttatatatcaaatgaacattgcatcacccctatttctaaaagccgttttttaaaactcacgtattcaagtctgccttgttagacaacttccacaaaatcattttattttagtgggcttgtcgtgtgaccgcccatcggcgaaatcaccgatcggcgttatcactgggtttccgccccgccttccgatgagcctttcgatacgtcgacggcgtcgttcccgtctcgtccagaaagcgccggttgaaattcgacgcattgtcgtacccgcattcctcccggatcctggccaccgcgcgatccgttgtggccagcagacgtttggccctgccgatacgcagccgtcgcacgaaatccgagaatccgatgccggccgcccgcttgaagaaacgggaaaacgccgaagggctcatcgacaccagacgggccgcctcctccagcgatatctccccggccaggttctccgtgacataggcgatggcctcgttcaccgtgcgttcggtgtcggagctgagctcgagatcataccccggcgtcaccaccgtggatgcctcggtctccggagcgtcggcgaatacgccgaacagctcgatcaggtcggccacacgacgcgcgggatcatggtcgcccatcccctccagcaacgctccggcagcctgggccgactccccggacagcaccatcgcacgcgcggcacagcgcagtaccagattgaaccgggcggtttccggaaaacacgccatcaacgccttcacggtctggggacgcacatggcacagcacgtcacgtcgggccaaccgctcccccggcttcacatcggaaacccagttatgcggaagattcgaaccaatcaaggcgacatgcccggcgcggcaggggaccacgcaatcacccaccatcatcagcccagaaccctcacggatgagatggaactcgatctgcggatgatgatgccacttggccagtgaattcggatacccgtggcttgcccatcgcaccgctgcatcggcatcgggaacgatgacctccaacgccccagagcccgattccacgacagtccgacgacggtcggcgaacatgatatcagcattcatcgaagcccccttcgcttgccctggcatcaccggcggaacggcccggcccatcccaccggatgggccgaaccatacccggctcagtcgcgatccacggtaatctgcaacttgatatcgccgggacgtccctcatccatacggtcgaaggcggccttggcatcggccatcgcataggtgtcggtgatgaacggcttgaggttcagtttaccgctggcgaccaggtcaatggccttctggtagacgttcgcgtaacggaacacattctcgatgcgcacctcggtcgcctgcagctcggtgatgtcgatgctcacgggatcgaccgggatgccgacgaggacggcggtgccgcccggcgcgacgagcttgaagaaggtctcgtaggctttgggggcacccgagcattcgaagatcacgtcggctccccagcctccggtttcctcacgcacgcgttcaacgagatcctccttggtgagatccaccggcacgattcccggaatcttgccgatgatgtcgagtttgatgctggaaacgtcggagacgatcaccttggatgcgccaccggcaagcgcgcaggaggcggtgagcatgcccaccgtgccggagccggtcaccacgcacacgtcgccgggtttgatgccggccttggtggcggcccacatgccgacggcggtgggttcgagcagcgctccctcgccatagctcacattgtccggaagcttgtaggtgaacgccgcgggatggttgaccgtctcgcacaggcagccatccaccggcggggtggcgaagaaacgcacggccggatcgacgttgtacatgccgagtttgctggcacgggaattcatgtccggaatgccgggttccatggccacgcgatcgccgacttcgaagccttcgacgcctgagccgaccgcgacgacggtaccggaagcctcatgccccaggatcatcggctgttcgaccacgtatttgcccacacgcccatgcgtgtaatagtgcagatcggatccgcacacccccacggtatgcggggcgatggtgagctcccccgccgccggagccggggtgtccggcacctcacgcacgttgatgacgcccttcttctcaagaacgactgccttcatgatgtactccttctgtttgtttggttgtttggttacatattcgattgccggcgggccacggcaccatggccgatgacaccgacgagtgggctctcaccgtcgagcgacgacctacccccgacattccggttcgggctgcgccaattcgccgctcgactccagaggcttccgggattccaggaccgtggcgcctttgcccttcagtcgccgcccgcgttcatcgaacccgggctgcttcggccggatgaacaccgtgatcagcgaaccgaccgcatagagcccggcataggcccagcacacgccgctataaccgacggtggagatgagaaccgtggcgatcagcgggccgaagaacgtggtcaagccggaggcgagattgtgtgcggaaatcgccgcgcccttatgctccggggcgagggccgggaatatggcccccatcggcacgaaggcggagatacccagaccgagcacaatcgcgtcggcgcacatcagcgccatattgccgccgaagaagcggggaatgtaatacatgcccagcgtgccgagcacgcacccccagcatccgaaccagcgcatctgccgcatccatccgtaacggtcgcccatacgaccccagaacacgttgccgaacacggtgacgacgaactggaatccccagatctggctccactgcgagacttcgaaccatgcgccgccgccattggtatgggtggcgagatacagcggcatgatgaccgggaatccgtacagcgtgagattgcagatcacacggaccaccgccgcgagggcgatctgccggttctccacgaggatggtggcgccgcggctcagctcatggaatttctccttggcgctcatcccttccgtcttctcgttgcgggtcgacggcaccagggcaaggcagatcagcagaccggcaaccgcgaacggcagggacagccacaagctgccgtattccccgacccatccgatggtgaaactcggcaggtatgcgccgaacacgccgatgccgaaggaataggacgtccagaaccagcccatcgccgtggcgagcttgcccggatcgacggtctgcgagatcaggaccacgaagctgtagatgaacaacggatatcccacgcctcgcatcgcgtacaccgcgagcatcagcgcataggaaccggacggcaatgccatggtcaggaacaccagatgcaggcagatccacgagatcgcgccgatgagcatgatgcgcttggcgccgaacatctcggcgagcacgccagacgcccagcctgcgaccgcggccatgagcccgtacatggtgaacatcagcgaggcctgagatgagctgaatccctgatcgacaatgtatttggacaggaaggtgagttcgaagccatcaccggtcatgaacacggcgatggcaatgaatcccgccaacagtttccttggcaatcctatggacatgtttcctcgtttcccagcacttcgttgtctgttgtgtctgtccgctcctccttgggcgtaataccattctcatgctggaaaaccgggtgttttggtgcccaaccacctcgttgtgatacttttttgacacgcgagacagggcaacatttcaaaaagtcttttgctaaagtaatgaggggccttacataggcaacggcgcgcgaaacggaaaggatacgtcatgaagcccatgccatccacagcggtcaaacaggccaaccgtcaggcgataatcgaccatctgtaccggcatggcccgtccaccaagcagcatctgcagatgaccctcgggctgagcctgcccaccatcaccgccaatctgcgtgaccttgaggatgagggactggtcggacgaggcgagccgacggaatcgaccggcggacgcaaggcgcagacccacgtgttcgccgcgaaatcgcatgcggcgatcggcgtgaggatgcgcgcggacggcgtcacgctggtggcggtggacctgtacggcgaggtgatcgcccgcaaacgcaagcgcgtctcctaccgcaacaccagcgactactacgatatggtcggcgatttcgtcaccgaattcgcggggcgtgtggtgcgttcgggaagccaggtgctcggcatcgccttctccatccaaggcatagtctccccggacggcagcgcgatcaccttcgggcagatcgtcggcaataccggtctgacgctggagaaactcacccggcacatcgaattcccggcgctcatgatccacgactcggacgcttcggccatggccgagctctggttcgaccccagcatcagcgacgccgtctgcatctatctggaacggcgcccgggcggtgcggtgatcgcccatggaacgctctaccaagggccgaacctgtccaacggcaccgtggagcacatgtgcctggtgcccggcggaaaaccctgctattgcgggcagcgtggatgcatggacccgtactgctcgccggaagccctgctggaggacggcgaaggcatgcccggtttcttctcggtgctgagccaaggcgaacgcgggcatcgtaagcgtttcgacgaatggatggggtacgtggcgcaggcgatcgtcaacatccgttcggtgatcgcgggcgacgtgatcatcggtggcgaagccgcgcaatatctggacgacgacatgctgaccgaactcaagcatcgcgcggagtcgctcagcccgttcacgaccgacttcacactgaagaaaagcatctgcatcgaggatcagaacaccatcggcgccgcgctgcgtttcgtgcgcgactacgtggacggcatctgcggacgcatgaggccactgccccgaaggtgaacacgatacgggaagggccgctgccctaccttggaatcaggtggggcagcggcccttcccgccattgcggatccggttatcacacgatctggcagaattcgatggtctcgtcattgggaccgtacacgttgaagtagcggatgccatgctcccagaagctgtcgatgtgctgaatctcggtgtccttgaactccagaccgagcttcttggcgttggcgaacgcggcctcgatatccggggtgtcgaacgcccagtggttgatggcgccggtgacgccgggtgccggctcaccctcccaggtttcgatggtcagatgcccgtagcgcaggaacgcgcaacggttgtcgccgttatggaacagtccggcgagttcaaatccgagcttttccgtgtagaacgcgatggtttcgtccagatccctggcgatcatgccggaatgctgcagatcggtggtgaaggcggacatgggtttggtcatgatgatctcctttgcattggttgatggatgatggttcatatcaacgtcgttgacgattggattgcgattaagtctagacggcttcggctgcggcaacaccgacgccgatgctctcctctgataccgtgttgaccgccggcaccgcatcgtcttgcggcgccgttccgttctttgccttagcgatccgatggccatgctcgtcgaatccgggctgccgcggccggatgaacaacgtcagcacgaatgccagcacatacaacgccgcatacgtccagcacacgccgccgtacccgatgaccggcagaagaatcgtggcgacgccggggccggcgaacgtggtgaggcccgccgcgagattgtaggcggacaatgcggcgccctgtttgccttcaccggcgtacaacgtcatgatggtcggcagcgacgagaaggcgcaggtgccgatgcccacgatgatcgaggcgacaatcatcatcagcgcgttcgcgccgaaccattgcggaatgtagtagaaggcgacggatccgacggcgagcaccgcgcaaccgaaccagcgcatcggccacacccatccgaaacgatccatgaaccaaccccagaaggtgttgaagatcagggtgaccacgaatacgaagccccagatgcgcatccattcctcggttttgaagatgttgatgccgccgttgtgcgtggtgcacaggtataggggcatgatgacggggaagccgtacagcagcaggttgttgatgatgcggataatcgcgcagatgaggatcttgcggttggtgacgaggatggtggcgccttcggccagttccttcagctgttccttacggctcagcccttcgcctttgacgaccttgttcttcggcacgaacaggaagcacatgatcgtgccgacgatggagaacggcagcgcgaaccagaaggtgcggtattcgccgaacaccggcatgatgaagctcggcaggtatgcgccgaacacgccgatgcccagcgagaagcaggtccagaagaatccggtggccgaggcgagtctggacggggagatgtactgcgccatcagcaccacgaaactgtagatgaacagcgggtagccgatgccgcgcagggcgtacaggccgaggatcagcggatagatgcggctggggatggccacgccgaggaacagcaggtggatgccgatccaccagcatgcgccgaacatcatgacgcgtctggcaccgaacatctcggcaagcatgccggcggaccatccgcccgccgcggcgaacagaccgtacacggtgaccaacagcgaagcctgggatgaggtgaatccctgatccaccatgaatttggagaggaaggtgagttcgaagccgtcaccggtcatgaagatcgcgacggccaggaagccgagcatcagcacccggggaacgccgaggcgctcaagcagcctaatcatgagcaataaaccccttacccgaccttcaccgacgttgggaagatcgtttcacagtcatatgaatgttcgcacacagcggttccggcccctttgccggcgccccgcaccgcgggaggcatggccgccgtccgtgtgcgcgtggcgacggccatgatttcatacgtgtgggcggatggcccgtggcgtcactcgccgatcttgacgacggccttggaaacgcccttgatcttgccgtcgaggaagtcctgcacctcgtcgagccccagttcgtggctgatcaggccgccgatgttcatcttgccggcggaaaccagcgagatggcatcgcggaaggtgagcgggttgatgaaggagccttggatggtcagctgcttcttgtaaatgtcgtacgtattcatttcgaaatgcgcctcctgcgggccgacgccgaacatcagcacctgggcgcccttcttggccgcggcgaccgcctgggcctgggtggcgggcaggccgaccgcttcgacgatcacgtcgtaggagtccgccggaatctgctcgcgggtggtgttgtacgtttcagtgacgccgaaaagctccttgttgcgctgcagcttctcgtcgaagattccggcaagatccacctgatgcacgccgtacgcctgcagcagctgggcgaagatctgccccatgaagccgtcgccgatgaccaacgccttctggtacgggtgcaacttgagcagatcgagtccgtgcaccgcgcaggagaccggttcgatggcggccgcgtcacgcagggagacattgtcgggcagcttgtagaccacagtggcgggagcggtgaactgttcggccagaccgccgtcgcgggtgacgccgaccgcgctcaagtggtcgcatagttccggacgctgagtcaggcagaattcgcactggccgcagtagatgttcggatcgacggccacgcggtcgccgaccttgacgttggtgacttctgaaccgaccgcggcgacgacgccggagttctcatggccgagcacgatcggcggaactgcggcagcggagccggggcgacctgcgtacaggtcgtggtccgtgccgcacacacctgcatatgcggtgttgatcagcacttcatcgggttcgatctgcggtgttggcatgttctggatttcgaatttcttgacaccggtcagtacaagagctttcatgatatgtcctttccactatgaaagaggttccggcagatcgttctgcctgatgattgaaaactatacactttcttaaattcttttgcaaatctcttttcataaagttatttgcaaagcgtgttgccgcagaaaatcaacgtttttcaaaaaaccaccatcacaatatgcacatcatcatcaaaaatagccagaacggcatctcaccggcagcgcagcaaccatcgatccgacattggcagagatggtcccgacatagcaagtcaacagataatttcaaagtgtttagaatgaggttatgaagaacccacctttgcaccgctacgcaacccgcccaggtctctatttcaccgacgatggtggcgcggacgccgttgtccgctcagaaacagcagaccaagtgtggttttgcgtacttgaaccacttgaccaaccgagcgccttctatgccgacgccgcacggctgttcaacgaacccggactcacgttcatcgatcaggccaaaaaacagcgcatctgcaccagacgcattccctcgctcaatcttcgcgaaacactgttccgcatggacggccccaactacggactgtggtacgtgcacgtgccacaagcatgggacggcatgcaatacggataccgcgtcaacggcccatgggatcccgatcatggcgtgagtttcaacccctacaagctgctgcttgacccatacgccaaaggtatcgaaggatcgatgaaactcgatccgggcgcattcgcctacgaatgcgaaatcgtcaacggcaaggtcaaaggctcccccttcggaccgatgagcaccatcgactcggtagggcgcatgcccgtttccgtagccatagacgaccgcgccatcgacaaacacgtaggagagccctcgcatccacacgttccgtggagcaaaacagttatctacgagctgcatgtcaaaggtttcaccgccaacgcgccatggctgcccaaagaacttcgcggcacctacgcgggcctcgcacacccggccacgctctcatacctgcaggatctgggcgtcacctccatcgaactgctgccgatccaagccaaacaatcggaactcttcctgcaggaacgaggatgcaccaactactggggatactccacactcggatatttcgcccccgaatcctcatatgccaccaaacgctcgcaagaggcaggagcggccgcagtacggcaagaagtcatcgacatggtgcgcgcattgcacgaggccggctttgaagtgattatggatgtggtttacaaccacacctgcgaatcaggccccgaaggcccgaccatttgctggcgaggccttgacaatctctcgtactaccgacgcaccaaagacaagatcagccgcctgtacgacaccaccggttgcggcaacacgcttgatttcaccaacacgcacgtcaccacgttcgccgtggattcattgcgctattgggccaaacgcattggcatcgacggattccgattcgatcttgcggcgacgctggcacgtctcgacggtgaattcacccgctaccatccattcctgtacgccttgcgctccgacatgctgctcggcaatctcaaaatgatcatggaaccatgggattgcggcccgaacggctggcgcaccggcgaattcggcattcctttcgcagaatggaacgaccgtttccgcgactgcacgcgcaaattctggctgaccgacgtggatcgcacacgcggcggcgaatacggcgaaatgaccatgcaagacatggccacacgcctatgcggatcttccgacctgttcgccaccgaccccggccgcggttcgaccgcctccgtgaactatgtggcctgccacgacggcttcaccactgccgacctgaccatgtacaagaacaaacacaacgaagccaacggcgaaaacaaccacgacggaacaaacaacaaccattccgtcaatttcgggcatgagggccccagcagcgaccaaatcatcgtgcagcagcgccagcgtgccatcatgaacctgctgggcacgctcttactgtcgttgggtacgccaatgctgctcgccggtgacgaattcggcaattcgcaaaacggcaacaacaacgcctacacgcaagacaatgacactacatggcttgattgggattggctgtacagcaccgagcagacgccggaattgaagcaattcaatctaacgtcacgtttaatcacgttgcgaaaatcccacgatttgtacagtcatgaggattttttcacgcgcctgagcaaaatcggtttgctgaagaaatccgatcgcgtgcattggtatcttccgaacgggcagatgccggacgattcggattggacgagtcctgccgtacgctcgttcgccatgcaactgctctcccccgacgagccgagcctgctaattctgatcaatggttccgacgaagtcacacgtttctatcttccgaaaggcattgaatgggagatggtctggtcttcatcggagatcgtcggcgaatatcccggtttgggaacatccatcgaacgggtgtcggaattcgacgcagagtcggaaaacaagccggcaggtagactgcgcaatcatctgcaccgcatcaatatgatgtactggcaggtgcaagacaatgaagcaaatctgcaatccgccgacgatggattgtcggaagacgatccgacattgtggacgctcccggcgttgagcatcagtgcgatgaagcagatgccgaccgcctgattccatcaagcgctgcctgaatcgttcgaataccaagaaacccctcggaaaacgaatttccgaggggtttcgtataagccgtaaagctttagcgcttcgagaactgcggagcgcgacgtgccttgtgcagaccggccttcttgcgctccacgacgcgggcgtcgcgggtcaggaagccagccttcttcagggcggcgcggttggcgtcacgatcgatggcgttcagagcgcgggccacgccgagacggatggcgccggcctggccggtggtgccgccgccgtcaacgaggacgatagcgtcgaacttgccttcgagcttgagcagaacgatcggggagttgacctcacgctgcagcagcttggaggggaagtactcctccagagtgcggccgttgatggtccacttgccgtcacccggaaccagacggacacgggcgacagcctccttacggcgaccggtgccgtagcccggctcgatcgcggaggtgccggtaccagcgccagcgttggtctcggtggtgtagttggtgagctcctcttcggtctcgacaacctgggagtcgttggtgttttcagccatgattcttatctcctctcaggtttcacttagcctgctgcgagacctgagcgatctcgaagacctggggcttctgcggggtgtgcgggtgctcagcgccgcggaagatacgcagacgatcgagctgcaccttggccagacggttcttcggcagcatgcccttgacagcttccttgatgatgcgctcggggttcttctcgagcagctcggcgtaggagtcgcgacgcagaccaccaggacggccggagtgcgagtagagttccttgcccatcttgttgccagtcagagcaatcttgtcggcattgatgatgatcacgtggttgccggagtcggcgtgcggcgcgaaagtcggcttgttcttgccacgcagcaggattgcagcctgggaggcgagacggccaagcaccacgtcggtggcgtcgatgacgtaccagtcgtgagtcagatcagctggcttcggagtgaaagttttcactggattaccttttctatatattgtgttccgggctgtcggctgcttggcgcggcttggtcagggctgcatccaagaggcttaaggcctcattatccgtgggctccctgaaagtcctcgatggcgagtgggatagcgctttgaaggaccccttagggaaacacaacaatccactagtatatcgccagtcttgacatagggcaactgtggagacactcccgcttttttatgtcgtctctcccccacctcgcttcgcgaggagccctctcatcaaagggggctggagtgagtcagttattgaagatttgggcgaaacgttgggcaccgggggtgtcgaagagggtttcgagcggcaccacattgcccttatcgtcggccagcgggatacgccagttcggatactcgttattggtgccgggctggttctgcgcacgcttctcccccaccgcatcggcaatcgaggcggcaagcagcttgcacggagatcccttcagcgcacggtacaacgcatcgatgatgtccgcctcgtgctcctcacggtgctcggcgaaatcggcgtccagatatccttgatcaaccagcatagcaatcatggcgtcttgctcagccttggcagaagcttggaactcctcagcagggccagtcagcagccccaagcgctcgcgaatcttgacgtgctcatactccaggtatccggcggccggcggcaggtcatgggtattcacggacgccaaggcatacggacgccattgagatggtgtgcggaacaccccgtccctctgctcgaaccattcgaccgcacagccgagaatgccgtggccggacagggaatcggccgcataatcgggcaccacgcccaaatcctcaccgaccaccacgccgttggcgcgggacgcctcgatggccagaatgccgagcatgatgttggaatcgtaatgcacataggcaccatccgttgccgaatgattctcaggaatccaccacagacggaacagaccaaggatatggtcgatgcgcacggcaccggcacgggcgaacataccatgcaccatgttgcggtaggtctggtagccagtggcttccaaatcaagcgggctcagcggcggttggctccaattctggccctgctggttgaacatatccggcggagcgccaaccgtagcgcccttggcgaaccgctcaggattccaccacacatccgcgccgaggggatgcacaccgaccgccatatcagacatgatgccgatttccatgccggcatccttggccgcctgctgcgcagcggcaagctgatcggacgccacccattcgagccagcggtagaagtcgagcgtatcggggaattgacgcttcaaatcagcaatctgctgagaatcccggccgagggcctgttcccaattgtcgccttgcgccgagggcgcaccccacttgtcataacacaggcaccacgtggcataggcttcgaggtcggaaccgaaatccgtcttgaactggtcgaatgcggcctgacgctcggcagtgcgaccggccttgaagataatccacagagcatgcatcttgctgcgccacatggcgtcacggtcaatgacctgggcatcgccgttcagcggctccacgtcggagtgcagtccatccacttcattcttggcatcggtcggcaatgtggcgtattccggtaccgactcagggcgaatatacgtgaaattgaccagacgacggctcaccggaagatacggcgacggcgtaagcggagacaccggttcggcggcgtgcaacggattgaccagcacaaaatcagcgtcggtcttccgcttggcgtcgaccaatatggtcttcaaatcctcgtaatcgccgacaccccatgatccggaggaacgaatcgagtacagctgcgccatccagccccacaggctaccgtccttcatcgggtcaatcaacggaacctggctcggcgcgctaatcagggtggcatcctgcgaacggttaccgaccttgacatgcagggtgtgatagccgaccggtacatcggcgggaatgatcagcgatgccgtagacacaaagttaccatccaaatcgaacgccggagatccgtctcccggcccgactccgatggtcccctcgtatgactcaccattctccaggatgatgcttgcagaaggtatctccatgatgccggtgttgacgagcagacggtcttcctcgccgacggtatgcaacaccgttggggcaaccagtcggctatggcgttccttcaaaatcctgtgaatggcttctttttgccgatcgtcgtctcgggcttcgatgcctagagcagacaggatttcaatgagcacatcatcgtcgatctcatgataatcgtggctcatgcccacatagctggtaccgatacccaccaatttggccaatcgaatcagcggacgagccaatcgttctttactctcggtattctcactcatagccccagtgtagcgccgaaaagccgcgccacaccgtaagacggccatagaatgcttacgtttgcaacaattgagcaaccatatatcgacatgagaacgctcacatggcggcaaaacggaatctagcgacgactctccaccgcgtgacgcacctccactgacggatcttccgccagcttggccatcatgtccgcagaagtgttggggttcagcgccacggcacgacgaaccatggaagaaagcaccgccggggcgccttcctcaagctcagtgccgagcaacccaagataatccagagtttcactgtccgcagcgggatcctgcgcaccctcgagccgcatcttccaactggtgcgcttgttgcgcagcgcggcatccctcacctcgggaatcggatccttggtcagacgcccgaccagccagttcttatcgtcctcgttggcagccacagccacacgcacggaaggctcgggatccacggacaacttgaccagtacgttcgggaacggcatggtactggcaagaaacacgcgatcttcgaccggcgtgtgcttgttgccagccacggcctcaagcagtgcggtggcacgcgagaacgccgcctgatcgctacgatcaggcagaggacggcgagcaaactcggaaagctcggcagagtcagtggaatgacgcaagcgctcgtatgaggcggtcaacggctcaaaggcggcgccgttggcgtcaccgccctgtgatgcggcggagtcgccgctctgctgggtctcattgatggggttctcgtcggtcatagtgtttagcttagtcatgccagaggaaccggaatgttgaccatgtcgattggttccggagataccgcagcgttgaacgcttctacgacctgcaactcgaattgttcgcaatggtcgacgggcaccacagccgtcagctcgacgttcgccgcatacgattcgtcttcctgccgtccatccagttggctgagcagctgctggaatcgggacaactgcgggtattcaagatgcacgcgataccggcgcgcagtcatgattcttgccacttgcgccgctttcatggccaatgacgccgcggatgaatacgcccgaaccaaaccacccgaccccaacaggattccgccgaaatatcgggtgacggcaatcacgcaatcggtagtaccggactgcttcagcacatcgaggataggcttgcctgcagtgccggaaggctcaccgtcatcgctcatgcgctcggacaaacgtccgtccgcgcctccacacaccgcggcatacgcgacatgtcgagcttttggatgctgctcgcggattgaggtcacgaacgcgagcgcctcatcgagcgtatcgacatgagcggcatcaccgatgaactcggatttcttctccacgagggaatcgtgggccggattgtcggatgtgttgagaatcgtctgcataggcggcgtttcgactagacgaatcagtgttcggagacgacgacgttatagtcctcgccggcaaagtaggcgttcatgcaggcgatcatctggcgggtgagctccttgaatgcgccatcggtacgccagccgacatgcggagtcagaacaatgcccggcacatggcagatgggatcatctgcggcgagtggctcgtggtcaaatacatcgagcgcggcgggaatgtcgccttcctgcagacgggcaagcaacgcaccggactcgatgacttcggagcgcgcggtattgatcaacattgtgccgggcttgagatgagcaaggttttcagcggtgacaatgccacgagtggcatcattcagcggcaaatggacggaaataacatcactggtttcaataagctcattgagatcgtcgaccggaacggcaccagaccgttcaaaatgctcggcaggcacatgtgaattccacgcggcaacttccatgccgaaggcgcgggcaatgccggccacggtagtgccaatgccgcccagcccgataatacccatgcggcggccggcaagctgcaaaccgtcgccccctgcccatgcccagttgcccgccttgacatccttatcgagttgtccgaccttgcgaatgagttcgaacagcagcgcgaacgtatgctcggccacggcatgatcgccgtaatgttcggcattgcagacacgaaccttaagctcacgtgccagctcgagattgatatagctggcgactccggtaccgcagaacacgatgcacttgacatggccttgttcgctgatcgtgcgcaataagtcatccgagatatggtagccgccgaccaacagggcatctgcgttgttcaggcgttcagccagcacggcttcgtccgaagtgaattcctcgaacatacgcacgcgagccacatcatgcagcgccgggaactgagccttgatgggttcaatcatcgcgtcgagcacggcaggcatcacgacaagcggcaaatcggtacgttcgctctgagtttcgtaaatctcggtcatgggcaccacattagaactgcggcgggaaattcactgtgcggtttgctgcgcctgttcttgggtaattttccactccttgacaacattctggtcggcacccatcgcataaatcacatctgatatgcgctggcgcacttgagcatccttgacctcggtccaacaagtgcctatgggatggtcgctgggtatcgctgtcatgatgcggatcgccttgctcgcgcagacgatcgatctgccagtcatggtcggcggccatgccattgatggacaccgtgccggccaccagaccgagtttgccgccgcctgtgggagaatcaatgaccaacggcttaagggaatcctcctcggttttgtatgagccggtttgggcaatgccgtcggcctccaacgtgtcccaaagccgggcgatgccatcggagccttgatcccatgaatggttggtggcatgagtgcaggcgttgtatcccacgttgcgggcggcatcggccacttcaggcggtatgttgaaaatcgggtaggcactgtaggggccgcctcgttgggcgactggagtctcgaagttgcatacggcgatatcagaggcctgaatgtactgtttcatcggctcaaacagtggatcaaagttgaaggcagtgccatccgtggcactggtgttggcaccgcggaaaccgttccacaggctctcgtggaacagcaagtcgccattcaccagcatggcgatgcagtcggtatccgggcaatccggcgaattgccgtgatgctccaccaccggctgaggaacggatccggatttgtccagcgacgtatcggcaaccgtgctggttccgggacgagacacatcggttgagtcgttatgcatggcagcgaaccatactcccagccccaaagccacagccaagacggcaacgaacgccacaatcaacgcgatgtgattgccgttcgacgacattgaacgatgctgcccttgaccgctgatatggctcatagcttccccattccgcgactctctgtactcactatcagagtaccgtccaagggcggcattgcttcaatattcgggaagaaccttgtcatatgccgtattttttatgacgcgccgctccccaaatgccggtagaatggctcacggaggcggacggacaatggcgtacctccggctccgctaatctggcaatgcgactatcgatagaacagtaacaataagtattagcgatggatacgaacttgcgagccgtgtacgcaacaaatgagttgccataaaacaaacagacatcatggattgtgggacacagttcatatgaaaaccgtgccccacattttttgcggataagttatcgcattctaataacagaactaccgatacgggtgagttacgactccggtgcgagaaatagaaccaagccagttaagcgatgccttgggctggcgttcaaaagtgtctttatcccaaccgataagaccgaatgtaggcttgaacgacccccattcatagttatcaagcaaggaccaatgcgtgtagcctcgcacatcaataccgtcatccatcgcgtcatgcagtccagcaagggcatcgaacgtatagtcgatacgacgacgatcgtcagcagtggcaatgccgttttcagtgacgaaaatcggcgtatgttttgcgacatcccaagtatgacgcacagcgatgccgagggctggaggatagtattcccagccagttagggtgcgttccacatcatcgtcgacgggcacaggcccgtccttgccgatgaatgtgcgtaggtaggcttgtacgccgataaagtcatcacccgcacccgcttcggtgaagtagtcctcgcgtgggtactgatattcctccatctccttctcacaaccaggcacagcatggaaagcctgacaagcgatggtccagccgacttttgcatcaggcagctcagacttaatgacagcgcgggacatatgatgcgcatcgactagcgccttggaaatcaccgggtcaggggcaggcagggaggcagccacaaagtcagtgccttccgtgccgccttgggtcaaagcgaccatgttcggctcattaatcgtgcagatccacgttacatcgttgagaataggcagcacataactcacgtaacgtttgaacttatcgagtgcatccggtcgtttccatccaccttctgcagcaaaccacaatggcatggtgaaatggtagatagtcaccataggttcaaccccgaactcgtggcaagcgtcaatcatggcgcgatagtgcaacaactcggctttggagaagcaaccttctacgggttcgatgcgtgcccactcgataccgaatcgatacatggtcagaccagagtcggcgagcagcctgacatcctcgcgatagcggttgtagctgtttgcggcatcaccggatggttcgctcacgtcagtacgaggcgagtgctcgcgcgcccaccagtcgctggaggtattattgccctcgatctggtgaccagcagtagcggcaccccaaataaagttttcaggaaatacgtaatttagagaagacatcgaagcttatctttcttgtttaattcccgcttatttaatgcccgtcatagccacgccctgaatgaagtagcgctgcaggaatacgaacaagagcaggatgggtgtgatgaccagcacggcgccggcgagcagcacactgtagttggtggcgttctgacccgtggagtagagggacagggctactggcagcgtgtacatctcctcgctttgcgcggaaaccaatggccataggaagttgttccagctagacaggaaggtcaggatggacagcgtggccagcgccgggccacattgcggcaggatgatctggaagaagatgcgtagttcgccagcaccgtccacacgagcggcttccatgagcgcgtccggaatgccaccgatgaactgacgcattaggaacacaccgataggctggcacaggaacggcaggatcaacgctgcgtatgtattggccaggtgcatgttcgagatgatgacgaacaagggcacgaacgtggcgacactaggcaccatgagggtgaccatgaccgcgccgaacaagatattcttgccggcgaacttcatcttggccagtgcgtagccgaccatcgagcagaacaccatgttgcccagaacagtgatgaccgcgacgatgaggctgttggtgaagtacgaaccaaagttcagctgggtgaaccactgcgaaaagttggctagtgtcgcgtgctcaggcatgagcttgggcggcttagcgaggatttcacgctgggtcttaagcgagcctagagccatccacaggaacgggaaaatccaaacaatgccaatgaccgccagcacgatgtacgagatgccacgacctttgatgaatcgctgccacaacagcagcttgttgtcctgtgccggtgcagggcatccggcggattgtattgttgcactcatatcgatcccccttagtcttcggaacgcaggatgcggaactgcagcacgctcaccaaggcgatgatgatgaacaacacccagctggcggcggatgcgatgccgtactggccgaatccgaacttctggtagacgtagtatgcggccgacagggtggaatcaagcggaccaccttgtgtcataacaaacgattcctcaaagaactgcaggtagccgactgacagtagcaccgcgccgagtaacagtgttggcttcatgagcggcagggtaatggagcggaaggtgcgccatttgctcgcgccgtcgatggcggcggcttccttgagttcttcggggatggcctgcaatccagcgaggaagataatcatcagcgtgcccatgttacgccagacagtcatgatcatcagggcaggcagagcataacgagtgtcgtgcagccagtccgatccctgtacgccgacgagggaaagcagggagttgagcaggccgtctccctgcaggatgtagcgccatacaacggagacggcaacgacgctggccacgaccggcgcgtagaacagcgcacggaagaaggcgttcagatgctgggagcccttgttgagtgctacggcgaacgccagagcaatgatcatggtgatcggcagaccgatgagtacgaagatgccagtgacaccaagcgaatgcaggaagcgcttgtcactgaacagggcgatgtactggtcgagtccgacgaagttcacgttgaacggggtacgcaggtcgcgggatgtgatgtcggtgaacgacatcgccatggaggagatgagagggatcagcataaatacgcagaagatgaccgcgaacggcagtgcaaatccccatgcaagtaatgtctggcggcggcgaagggagctgccggctcccttctcctgcgccttcgcgtgcttgaccattgctgtatgtcctgatggactcactcgccgatgccgatggaatcggcttcggactgcaggctcttcagaccatcgcccacagaaacctggcccttggcaatctgttcgtaaatgcggtcagctgcggaggaaacctgtgcccaagtggtaaaagcaggcacgccctgagcatgttcaagctgatcgccaaatgcggttaatgtggtgctggaggtcagtgcatcattgtcccaggcgctctgagcagccggcaaatcggaggacagggtgtaccacttagcctgcacgtcagactggctagcccactgtatgaacttccatgccgcctgcttattcttggaatccttgaaggtaaccagcccggagccaccgaggtaggaagtacccatgtcggaggagtcgtccattgcgggaagcgtcaccgttgcgtacttgtccttgatgtcgtcgccaccgagttcctcgatctggctgacagcagtgggcccttgaagcatcatcggcgtggtgccggctacgaagtcagcgatgtcggcaccggcgctcacatcagcattggcatcagcgataccgtccttgtagaagccggtgacatagtcaagagcctcggtcatcgcatcactgtcgatggtccacttggtctggccgccatcggagagtgcagcgcctgcggagtaggcgtatggcaggatgccaatgaagcagtccgtgccagaagcaccgatacgcatgccgtaatcgacgccatccactttctgcatggcttcagccatcgtcttgagttcgtcccaagtcttcggcgtttcagtgacgccggctttctcagcgatgtcggtgcggtagtacagcacgcgggtgtcaacataccacggcacgcccaactgccgatctccgaccttgtagttgtcggccggcccttcgaaaaatccactcatgtcaaagttgccggggaccgtagagaaggaattggagaaatcggccatccacgtgttgcccatctgagcaacatccgggccgttacccgccgcgatggcggtctgaatcttgtcgtgtgcggaagaccacgggatagcggtcaccttcacagtgacatccgtattctccttctcgaaatccttaatgaagtcgccaagcaaatcaccttcgttacccatagcccagatggtcagatcgccggtggccttagccgaatcgattgtggtcacgtcatctacactgtcagacgtagcgctagtgcgtccgcaggctgcgacgctggtcagcatagccgcactggcgatgatggcagtcgccatcttgaacatgcttcgcttcattcctcgttcctccttgaactgttacttctcaacaatctaaccgcgtagattgtgattaatatttaagcgcatagttttttgtttgtcaactcgcgaaccgattcgacacgacgaaacagcatcaacagtgactcccccctgcaggaggtctcaaaagccttatttagccttcttcaagaaataatcagcacccgcagctgccccgcacgatgagcttgaccggcaaacggaaccgttcgggcttgccccacggctcccctgcctgctcatccaacagtcgggccgccaactgccccagcagctccaagggctgacgcacagtggtaagcgtgggagtcagcacctgaccagcgagcacaccatcaaaaccagtcagtatgacatcctgaggaacccggacaccggcatctcgaagtacgctcatgacttcgaacgcagtttgatcggtagcgcatagcaatgcctgcggcaaccgtccagcgtctattacctcgcacagatctacgaaccactcatgcgtgccagacacactgtcatcaagcggcaagtccggaacccgcaaccctttcattttcagttttgcccgcatcgcagcaaatcgatgacgagaatcgtagttgtccagactgcccacaaactccatgtcatgcacgccgtggacatcaaccagatggtcaatcagctggttcatgccagtttcgttgtcacaagagatgtaggccgcaggctcgtcaccatcaccctcgctcagacgcacgataggtatgcttcggcacaaagcctccaatggcatagtgctggtgaattcgtttggaaacactgctaaaccatccacgcgaccagctacatctgtgatacccgcaccatcgtcatgccgaatagcagtacctagcagcacggcacgattgcgacgccggcattccagctcgaatccacgctgcacttcatccacatacaatgggtacgacaacacactcgggcaatcaaagctctcacctgcgcgattggagaaaattggtttcccattctcagacacgacatcgttgccgccagagcatgaatcgaaatcatcctcatcgccaagcggccgctcaataagcatgtcaaaggaatacagaccgagcacgccggtgtttccgcgagccaagccacgagcgttggcgctgggcacatagtcaaggtctttcgccgccctgagtaccttcgcccgggttgaaggcttgaccttatccgggcgacggaaagtaaatgaaaccgtggcggtggacactcccgccttcttcgccacgtcatacaccgttgccctacgcatgattcctactttaatcgattccggaggtcagcacacgttcgacctgaatctaaaaaaagttttagtggctttcctgtcaatctcgcatgcatacttcaggttacgggcgcagcacccaataatgggtaccgcgccttaatgaccgctacacgagcagtctcagcaactggtaaagctgccataggctgcgcacgttgaaatgcatgccatccaccgtggcgcacgcctcgccatcgcccacatggacaatgacggtgcgaccgttcacggtcagaccaccgtgcatcgtgatatgattcatttcgtaacctttggttaggggcgtaagccgataaccacaacaaggcccgatgttcgtagcgtcgggcctttttgctaccagcttccgccggtaacggcccgtcatatcaacggggatgccgcatgttacgacatcactatccaatgtaccagttgcacgaacgcagcctgaatgcctagagaacaacaactgttcattcacctgagctataagagctgacacgtccataagccggtatttatgttcctagtgcggtggagcaggaaaacagaaagggcctccgagaaatcccgaaagcccttgctcgcggagtcagagggattcgaaccctcgagccgtttacacgactaacaccttagcagggtgcccctatcggccactcaggcatgactccacgttacgcaatgaagcgcaacagcaaaacatcgtaccatgccctgcggatacaacgtgccgaatgcgtccaaaaaagcgcaagacggccttgccggccaggcagcccgtcacttgcccttggccagggacgcatcaccgggaaaggtgacgatcacggcacagatcaccaatgcgacgccaataacctcaccggtgtctggaatctcaccaaacgccagccccacggccacggccattgcagggttaatcgattgcatgaccgagaacgctcccgaggcggtgcggcgcaacgtaatctgttccaccgcatacgggatgaaggacgccatcagggaaatcacaaacagcaacgccaacagtttccatggcccgccaggagcaagcgcccatgtggcatcggatttcggatgaatcacatggctcacagccggcacgccaaggaacaacgactgcaccagccagccgacggcaaccgcgatgcacaggttgtcaagcgagttgcctccggacgccacacgacggcctgtcacaatgtaaacgccccacatcgagccgccgataaggatggcaatcagaccaatgagaaaactaccctgtcctgatgggttggccagcgaaatcccggcctgcgccatagcaacagcatcactgccataaacccgacgcgataccagaccgaatacaacggatcaagctgggtgaatgccagtttggcaatggccatagccgtatagatgaccaacgcctcaccgatcacgatgcacaccacaggaacccgattgaggataccgaccgctgccttcttcataagattcacgctactcgcagagccgggacagtacatagtcggaagagttcggctcggacaacgacataatgtggacgtccctatgagactgcttacaatggtgagcatgagcaccgcaccgagacttgaggccgccaagcgcgattggggtcatgacgagaccggctgcaccgtgctgcatatcgatatggatgctttctacgcctcgctggaagtggcccgcaatcccgggctgaaaggcaagccagtcatcatcggcaccgggccgcgttcggtagtatccgcagcgagctacgaagcgagacgctacggcatcaattcggccatgccggccgcccgcgcccatcaactctgcccggatggcgtgttcctgccggtggatatggcgtactaccgcatgatgtcgcaccgcatcatgcacgaggtctttctgaccatcaccgaccagttcgaacaggtttcggtggacgagggatatatggatgtgtccggcgcgctgctggaatgggacaaaccgagcgcaatcggggcatggatacggcagcaggtggccgaacgattcaacgtgacttgctcggtgggcatcgcctgcaacaaattggtggccaaaatggcttcgaccaacgccaagccaaacggcatgctgctcattccggcggcacggtcggcacagttcgtgcagatgatgccattgcgcggcattcccggcattggaccgtcgctggagaaacggctcaacgcctggggtgtgcattccgtggccgaattggcacaaatggatgaagccgctctcatacaggccactggatcgcccgccgcggcgcgcggactgtgggcggcctcgcatggtctggattcacgtgagatcgcaacaacccgcgaagagaagtccatcggttcagaacgcaccttgaccgaagatacccgtgacatgcacatcgtatgccggctgctgcgttcagcatgcgatgaagtcgcccgtaccttgcgccgcaaaggattggtggctcgcacgctgacagtgaaattgcggttcgccgacctgagttatcagaccagatccttcaccatggagcagccgaccgatacggcaagcacgctgtatcccgaatgcgtgcggcagttgaaaattatgcttggtataccggcgaacgccgaaccgaccactcccctgccaaaactcatcaggctggcaggcatgagcacatcatcgctcagtgaggcacatgctaccgcagtgcagccgtcattagacgatctgctcgaagaggccgatgacgcacacgggcagaccacacaggcgcgaatgcatgacgccgaagccgcactggatgccgtgcgccgcaaattcggcaacacggcggcacagttcggggcgtagttaggccatcagacgctggcatgcagcgtcaatggcatcatcggtggcggtggcggagaaacgcagatactcgggggcaccatagaactcgccggggctgggaatgatgcccaactgggcaagctcggccatatccgaccagcaatcaccagacttggccttgacccacacatacagtgcacctgacggcatctgagcctgataaccataggcattgagcgcgtcgaccaatgcgaccaatcgaccccgataacggttccactgcgcatatacggagccggcgtcgttcagtcctgcggccatggcggcctgcaccggccccggaatgatctggccaatctgtttacgatattcgcccatttcggcgaccagccggtaatcgccggcaatcagtgcggtgcgatagccggccatgttggactgcttggacagcgaatacagcaccaggatgccatcggccgagccttcgcatacctgctggttgagcgcacacggcgtggcgaacaggctgaacgcggcatcagaggcgggctcgttggatgccgccgcaggcctggaagtcgtattgcgcgccgaacgccagtccataagcgcgtaacattcgtcggagagcactactgcgccaatgcgtcgggctgcagcaacgatgtcggctagccaatcggcggaaatgacttcgccggtcggattgcacggcgagttaatccagatggctttgacattgggaatgttgacccaggaatcgacatcggtcacgtcatcgaccttggccacggtagcgccggcaagctgggtgccgatttcataagtcgggtaggaaaccttcggctgcaccaccacatcgccctcgccaagatgcagcaagctggccattaatgccactgcctctttggagccaacggtgggaatcaccgccgcgttcacggctttcaaatccacaccgcgcatattgcggaaccacgaatctatagcggatttcaaatcgacagtgcccgccgtgaccgggtatccgtgggcattcgacgcatccgctgtagaggccaacgcctgctgcacggcgtcaggaaccgaatccacaggcgagccgacggacaggttgatcatgccgcccggcactgccttggccgcggccttgaaaccggcgatgcgtgaccaatcgtacggcgacgaatatgcatgaaagcccatgggaaccctttcttggacgatatgttcctaagatacgacgagccctcggcctattgaccgagggcttgcattacatgattgagcgaatcagctcactgattctgcggcggcagcgcggccacctgctcgggatccttgccaatcggaccattggcggaagcaccaccaagatcgcctacttcggcaaagaagctgacggctgcgtccttgtaccaggcccactcatccggcagatcatcctcatagaagatggcctcagtggggcacaccggctcgcaggcgccacagtcgacgcactcgttcggattgatgtacagcgaacgagaaccctcataaatgcaatcgacggggcactcgtccacgcaagccttgtccttgacatccacgcaaggctgagcaattacgtatggcatggaattctccttacgaacaactttctacaaaaatacgcgcgcgttaggacgcgcccccgacacctcagccgttaacggcccgatcagtctcgtcagatagcgtttcgctcaaatctcccttaccgagacgagcgtgccagtaaccatagctgaagtagatggcgaaaccgatcaccagccacactaggaaacgaatccaggtgagcacagacaggttcaacatcagccagaagttggccaaggcaatcagaatcggaacccacgggttgccgggcattctgaaggcacgcggcaattcggggcgtttcttgcgcataatcggaatggagatggccaccaaggtgaatgcggacagcgtaccgatgttcaccatgtcagaaagcacgccgatgtcgaacagggcagcgaccagggccaccactacgcccacaacaatctgcagaacggccggggtgccatgcttgccggtcttggacaggccacgcggcagcagaccatcgcggctcatagcaaagacgatgcgggtcaagcccagcagcagcaccataatcacggtggccaaacccagcacaataccaaagctgataatcttggcggcccagtcagccccgaccaattcaaatgccgtggccagagacgggctatcttgcttggcaagatccttataggagaccatgccggtggtcacaatggccacgagcatgtacatgacgataatgagcagcatgccgacaccgatgcccagcggcacgttcttgtgcgggttcttggtctcttcggaggcggtggccaccacgtcgaatcccaggaacgcgaagaacacaagcgccgcaccagacaggatgccaggcacgccgtaaatggacggggtcatgccagtggcccattgccatagcggctgcgccatctgagcgctgacggcaccgtcgccggtagtggctgcggccggctggctcggtggaatgaacggggtgaagttggaggccttgacgtagaagaagccgacaatcaccacaaacaccacgatggcgatcttgagcacggtcatcgcgccatccacacgagcgccaatcttggtgccgaacaccagcaacacggtgaagaacgcgacgatgataattggcgcgaggtcgaagttgaaggagcctagcgccagatcggtattcacgttccaacccatcagacgtatgaaatcgttgagatacacgccccagtatttggcaatcaccgaaccggcgaacagcatttccagaatcagatcccagccaatgatccatgccgtgagctcacccactgtggtataggtgaaggtataggcggaaccggccactggaatcatcgaggcaaactcggcgtaacacatcacggccgcgccgcagacgatgccggcaatcaggaagctgatgatcacggccgggccggcgtggaaagccgccgcctgcgcacctactgagaagatgccagcgcccacggccacagccacacccatgatggacagatcccaccacgttaggctgcgcttgagcttgcgaccctcttcacctgtttcggcaatggtctgttcgacggatttcgtacggaacagttgcatgatattgctctcttctcccctgcctacacgccggacgcgcgcagcactgaaaatgagtataaatgggggtgattacgttgtccatcaatccgttatccagtggaatcactggtttgccggccaaacggccaggcgatcatcgccaagttttctgcgggaaatcacagcacgccgatacagaccggctccggaaccaaggtgacgccgaatgcttcccgaactgcttgctgtacggccttggccaagacttcaacgtcggcggcactcgctcctccacgattggtcagagccaacgcatgctgcgtggacagacccgcagacgcatctggactgaccttgtatcccttatggcagccggcatggtcgataagccaagcggccgaggtcttgacgccaggcgtaccatcgggccgggtcgcgtcaaaacgaggagcgtcctcaggcaacgtggcagcctgctgtgcagagagtatcggattcataaagaacgaaccacagctgtggcgattgtaatcaggagcgggcaaaccatcgctgctagccgggataccggcctgattgttcagagcggcaagccgatccaaatcagccagaatattggcctctcgcttggcggtggccatatcgggcagtgcataacgggtgggatcttcgagcatgcccttggcggcacgaaccgcaagtacggccttacgaatatcggtggtggccatgcgatcgcccacctcgacgccgagcgccttggccaattgcccatagccgaccgtgccttcagccgaatgggtaagggcaaaggtaacggatagcaccacataacgcggggtcgggaagaaccggtcggcaggcttgccgggcccggcatacatgctggccttgagtgcggagtaacggtatccgaactggagatcggcaggagtcaaatcgcgcgtggttttggtttcgcggtcccagacctccaccgattccaccgaagtggcgacctcctggccataggcaccgatgttttgcaccactgaggcaccgaccgtgccggggatgccggaaagcccctcaacgccttcaagcccgagttccacggtgaacgccacaaaatcatcccagttggcgccggcctcggcattgacatggaccgtgcgatctccgccttcgaccggtgcggcctcgtccggcacggtgatcaggcagcgcgcatctcgcaccaccacgccgttgaaggggtcatcggaaacgagcatattggagcctccgccgataacgaccaaaggaagtcctttggaatcggcgtcttccacggcctcgatcagtccgacgcgcgtggtcggctcgacgaagtgggcgatatgtccgcccacacccatggtggtgatgtctgcaaagcttgtcatggcttcctatcttagtgtcgcacgggcgatatcgaagcaatcgtcgtctgagacagcagcaagttccatacgcaaaaacccggccgcatgggccgggtttgaaacataatgctgtgcgcagcaatcaacgagtctcgcggtgcacagtctgcttaccgcagcgcgggcagaacttcttcagctcgagacggtcgggagtgttacgacggttcttcgtcgtaatgtagttgcgctccttgcactcggtgcaggccagcgtgatgcccggacggatgtcggcgctcttagccattgtcattcacctctgtgttcttataaggtttagtgcgcgcccaccggttagcgggcgcgatttgtagcgaggaagaggctcgaactcttgaccttacgattatgagtcgtacgctctagccagctgagctaccccgccagagagccccgagtgagaattggactcacgacctcttccttaccaaggaagtgctctaccactgagctatcggggcgtggcggatagtggattcgaaccactgaagcacgaagcggctgatttacagtcagctccctttgaccgcttgggaaatccgccagtctgtttcccgccgcggtgtttgacctcaacaggcaacttggctatataaccacaaaacccagacaaacgcaaatcggtgcgacactccgcgaattcccgcgtttttcccggatccacataggccagtcggagaaatcaggaagcggccaagacgacgcactcttcttggagtcatcagcatcggctttcttgctgccggcatcgttggcgttatccgtagaatcggactgtgcggaggcatcgtcggattgaccgtcaacggctgagctttttggggagaatatgcattccctcggccccctcagtcgtctacggcgacagttcccctcaaagaggggagccaagacacacaagacgcaaaaaccccgactgttcgcaaggaacagtcggggttggtgaagttctctatacgactaatcagccgagaatggcaagaatgtcgcgggaggagacgatgaggtagtcctcaccctcgtagtgaacttcggtgccgccgtacttggagtacagcaccttgtcgccgaccttgacatccaccggaatgcgctcgcccttgtcgtcacgacggcccgggccaacagccaggacttcaccctgctgcggcttctccttggcgttgtccggaatgtacagaccggatgcggtctgagtctcggcctcggcctgcttgacgatgatcttgtcttccaacggtgtgagcttaatcgacactgtgggtcacctcgtatctactcgtagttctaatgccgcgccagaacacctcaagaggctgacgatcacttgcgttgtccctttgcgctaggacacatcgtagcgcgattgttagcactctgccaactcgagtgctaacgctgtgagagaaatcccttagttgccgcggcgggcaagaatggaatcgagccccacgctcaacgattcagacgtggcgaccggggcctgcacctcagcacgctcctcatgctcatggaaggattccggctgcgcagcactgtgatccgcttgagccttggctgccgaggcgtcgtcggaagccttgacggccttggcctcatcaatcagcttgttcaccatctcaggctcggcgggagtggctttggacacctgacgcgtcgacttgatttccaagctttccggagcgttatcttcagcatggtccgcccccagagagaaggagatgagatcctgggaggtggccatatcgaacacatccagcgcacgggccggctgaacggaagcgagctccgacgtggcatcgtccgcaacggagtcatgcgcatcgcgctcatcgcgtaccgtcagggaaggtgtctccgcttcggaatggtcggcagcctgcggcgcagcagcctcccgatcggccttggcttgtgcttcacgcaacgccttggccttggcctgctcgacttcagcgtcatgcagcacgcggcgaatctgacgctgttccatcacttcggtggcagcatcatctgcacgactcgtctgaacggccggagcggcggactcggcagcatggttcttagccggagaatcaatctgctcctgccgagtaggagttgcagacgtcttcttctgctcatagcgggacaccctgcgttcccactgacgggcctgacgtgcggcattcgcacccattgccagcaccgctgcggtcagggccaaaggaatcaaagcgaacaacgggctgtaatgcacgatgaacgccaacgcaaataccactatggccacggcgagaaggctggccaccagaatctggcgacgacggatggattcacggcgcaattcgcgtatatgcgcgatatgctcggtcgtcagccgggctgactgtgtcgatgctggcattgctgcccctttcgcctgatacggctcgatatcgccgaatcgtctaccgtcttccgcttccacaatacgcagggacggcgaataacgatcttgccgatgctcagccgcgcgcttcatgccgttagccgtacgcgcgggcaaccatacaacgatggcaattatcacaatcaccaagacgacaaccgtgctcagtgactcgtaacccataccgtcaagaataggagacatattgaccgaaccagcacttcccgctcgggcgtgtcgggagtattaggagatttattggaggttttgcgaggccaatcgattggcgaacccttgcccggcatcctcggccaacagcgcaaaggtcacgtggtctcgccactgaccattgacgtacatatagcgctcgcgcagtccttcatgatgggccccgaccttgcgcaccaccgctaaagagcgcgcattgtccggcaaaatggcgatttccagccggtgcagaaccgggccaaagggatccgtcagtgcccagtcggcgagcaaagccacggccatgggggcaaaaccatgaccggcgtaacactggtcaacccaatagccaaccacaccggtgcgcatggatccgtaggaaatcgcccccaacgatatctggcccacaatgcgcatctggtattcgatggcgaacaacgcccccaccccatgctgctcgttacggcgctggcgctgaatccactgattgaaggtgatgaatccgccatgcatcggatctcctgattcccacggggcaagccaatcattattgcgccaccgcacctcattccactcttcctcgtcgtccaaggtcagcggcctaagcgttatgggaaaagcaggatgggaaagacgaggcatacgaatctgatgatccggcttgaacgcctctttgatggattggaaaactgacacggcctttattgtagccatgctaggttgtgcggtatggataaggcaacgctacggcacagattgctggctcaacgagctttgattacgcctgaggcctggcttgcagcaggagaaaaactggttcatcagtttcccgcatacgtgttggatcgcccctgtattcactacggctccgctccactgacggtggcggcatatgtgtcgatgggatccgaggttgagactcgtccgctgttggcttggctgctagcgtcaggaatccgcgtgttggttccgttgttgggatccggcctggatatcgggtggagtgcactggattcgatggaatcactgcatccagtggcgggttctggacaccggcggcctgacgagccgcagggaactccattgccgcctgaagcgttgcacgatgccgacctgattatcgctcccgcattggctgtcgaccggcatggcaatcggctgggacgcggggccggctggtatgaccgcgcattagtgaatcgtcggcccgtctgcccgatcatcgcagtgtgctggccttgggaggtggtggacgacgatgagtggatcgcggacccccacgatgtgccagcggatggcgtgctgacgccagaaggataccggcagctgccctgattaccggcgaataccgaacataagacggcttttatctcgcctgcgtatgcctgcagggcaaagtgtcagggcggcgactaggatatgaacggttgtccggcatgacgacaatgcctatgcgtgagaattgacttgtggaggaatccgttgcctacttatcactaccgctgcaagaactgcggctatgacttcactgaacagcagtcgttcaacgacgacccgatcaccgtatgcccgaagtgtgctcaggagcaggtgcgcaaggtgtattcggccgtaccgatcgagttcaaaggccacggtttctaccgcacggataagtccggcaagtagaaaaaccgacctgacaagctggaaccacaatggtcgtttcagcttgcaccgagagataagcgcaagtcaccatgatgttcatggtgactttttctatattcacgccacccacgcatggcttactacggcgccgtcgtatgctgcatgccgcgcgcaggtgcattgccgcgttctgcgccggtttggccgtgctgtttggattgggaacagtactggctcaggtgcagaccgctccagtggtgattgccgaccggcctattgcgcgcggcgagataatctccagcgccgatatcagagtggagctactgccggtcagtacggttggatcgtcttatgccacagatgccgatgagatcactggactgattgcgcagattgatattgcggtcaatgatcccatctctacgcatatggcacgagatgcaccactgccgcccaccggcaccacggtgattgaagtgcggttggccagcaatccagatgatctcttgcccggagacagcgtgcagctggtgtccgccgtgggatgcgccggggaggattgcgtgctcgctgaggaggcgctggtgatggctattggcgaggctgaagcatcgtcacttgggagcaatgaacgacaggtctcatttgctatgaagcctcatgccgcggctgcagtaatggagttgcagcaagccggcgcgatagtcgccgtgatgcggtgaccgtctcttgctcccgccggcgggagctggctcgcgaagcgagactgaaggtggactgttctcccaaccaccccagtcggctttatcgacagcccccgccagagagggcgactagcgcttgtcgttgaacacagcccaatgagctgagccgtatagcagacagcccggtgggctgtctgtaggcgaagtgagcggctgcactacaagcagccacgaaggccgccccattgggctgacgttcaacgcctgtcgttgaacacagcccagtgaggcggcaactcgccgagaatgcgcctgtcatcgtcggctcgacgctgctggtcggtttgcatgtcgccaggctcgagcttgacaccgtctgcatcgaagctttcagtgcccttcatcactactcgtttatgtttgcgtggggtgcgccttgtagccgaatattccgccatgtctactcgacttcgcgatagatctcgccgatacgggccacgatgcgatcgacttccttatccgggttcacgaatgccgcaacgctccatacactcatgacattccaacctagggaaatcaaatcctgtgccgataggcgatgacgcttgcgcgtggactgcacggacatgaagctggcatcatcggtctgcaccgccaacgcgaacgggcgatccttaagaccaacgaccaaggggatccttgaacccctatcgaaaccgtaattcacagccgcttcaagaccgcgcgcccgcagacgctcggcgatatcttcgaacagtacgttctgaccggcatcatcacgcgtcggcaatatcggacgatcgttgaattgctcagcccaggccagcatggtcttcaggaatcgtgggccctgctggtggagacgctcatcctccatatcctgagagccaaacgccgagacgatatccaagttgcggtcggcaagcgccaatgcgtcgagcagcatgccacgtcccccctcgtgctccaccacaccgaactgctgcagcaagcgaccatgcaccgtcttggcatagcacagggacagaatcacgtcggtggcctggcaacccgccacgtcacgcagcggaaccagccgcacatgccgcaggaatcggcccatcggcttgttcttggaggccaacgacttcaattccgcgcccagacgagtgcggaatacatcagtcagcgtcaccacggtcagcacatagctggaaggcaccacagtaaagctggaagcccgctgagtgataaggtgcaccaccttatcgatctcctgttggctggattccacaagaccagacagcatgaccggtacgccgttggcgtcctcgaccgaatggaaacgcaccttgcctgatgccggctcagtcgccacatcataccgaaccgaaccatagccctcagattcaaggaatgcagcgagacgcgggtcgcggcgggtcggagcggactccacttcaacatgaggaagcaaatcaatcagttgcttcacggattcactggtcaccgtagcgcaatgggcaatcaccactacctgacgcacacggccaagaatcgaaagcaattcgatggatggaatatgcgcgcaggcatccacaatggccacatccgcaataaccgcggggtcggtgagtgcggccaaagtgcccggcgtcgccacgagtatcggcttggcagcagccaaaatctccggatagtcacggcgaatacgactgagcgacacatgggcacgaccggctaacaccgtatgcaactggttggcctcctgtgtatgggagaacaacatatcgcacaaacgccgcatcgattcctgagataccatcggccccacggaacgcacatgctccacatcaacctgggcgaaccggtcggatgcggtttgcaatgcggaaccgtcctggttggaaatgatggcggacgaacgcacgatatcctcaaacaccgtggtccaccatgccagttgcacttcgccacgaatctgcggcacactcacctgacgagtatgcagatcctcgaccaattcgttcagtccgacaccggcgaattcatgttccaagcggcatcgttccggcaaggtatcaagagccttacggtcatcaagcaaggccttcagacgcacctcgacagtattgaaatcggtggatcccaaattgccgcccgccggagtcgtggcgagcacggtgtcaagcgcagtcatatcgctgaccatcgcatccaatgtggtgatgatgtcgtccagcttggtggggagcaccggccatccgccgtgtggcacgaactgcctccactgctccgactgccgagccactactttgagcgcttcatgcaggtcttccacctgggcacccacgcgcagcagacccttggcctccttgatatgacgacgccgctcccagaagcccatcgcgcttccttcagccttgcgctgagccttgggcttggtcgcttcgatcatcgaatcgatgtcgcgctcgaaaatctccggctggaacacgtcgagcacgcggcgcaggttcttgagcacggtgacctggcgctcccattcgcgaatggtcgagggaacggggaatccgcacgtctgtacggtacgagccacctgctcacgggttgcgggaaggaaccgacgcagcaaatcatccacgcgctggtaggctgccactgcctcctcctcggtgttcaaggaggccttgtaccaggcggtatcatccggcccgatagagaattcgccgagttcaccggcccgctccaacttgccgacccatgcttccatatcgccggcaatggcaatcgcgctttgttcggtcaggcggatatgcgtggcgggatgcgttggtagcacggagatgcgagccagattctgaatcgtctcgtaagcagatacgttccacttatcgtttaccccgtgcaagtcgcccaggtaccgggtcaggcgggagcgcacgcccacaagttcatcagcaagctggtcgaagcgctgggtggccacaccttgctggaatcccacagcggaaatcagctgcttgtcaatggcggcgttggcctgcgcatcagccacatccaacatctgagccttcagctcattggcagacacggcttgcataaacaatcgcttctgttcggcgactcccggcacatacagcaccgaccgaccactcatcaggcagcgcgaagcgacggctaccgcctgctctgccgtgcctttggggaactctccgtcaatgacgatgctatggcctgcggctgcaagcgatgcggcatatcgcacggtgttgtcgacatcgcctacctcaaattccgcatgcggatctgcatcgaacgggctgtactgcgcaagatcggcatctttgagggacgactgcgcatgttcgttaccagcgagtgcatcaagcagcacattgtcgctttcgccgttctccagctggtcgatgaagcgctggctttcggcaatcatcaacgatgagggatccacaaagcagcccagcacgatttggcgctcgatattgaagtcaggaatgcgttccacggcttccgccgtgattctggcgaacatagccgaggtttcaggctcgccactgtcatagctggaaccgtcaaacagagaatcctcgtcaacatatacccgctgctctcgcagcacattgacgaatgccgtattcaacttcacacggccggtgaactgcacagtggcggcggattcttccttgggcaccgtgacgttgaccggatacagcagcacgggcagtgcattgcccttccacgtggccacaccgaccaccaatgagagctcggccactccggacacacggcgcttggcggtctggtcatccatgacccgagacaagtgccgttccgccgccttcaacaccccggcatcacggaacagcgagtccaagcgaacatgtcccgaagcgaacaattgcgcaatgccggacggatgggcatgcgtcatatcaagtttggccaccagctggttcgcgtcctccaacggagagggggccaacatgccgcgatactggtcacgccagcgacggatgcggttcagaccgttttcagcattctgatcctgcgtctgggtcatctcttggctcactttccaaccgcttcgcggtattcctgatatcccttgttatgggatagagcttcgtcgatgtcggcttcgcctctggcggcgagccaggcatacatatcgtcatacaggtatgggttcattgccagaaatgccagcaactcagggtgacgagcaatctcgaactgcgtggagaaatcctgcgtggttttagcatcgtccgaggtcaggccatcaacttccaccaccggctcctgggccttcagttctcccttgctcacacggtcgaacacggaacccggctcaaaagctggtgtatagacgccagtggtgtcagtctcgtccaaatcggcaacgcttacttgaacgggctggtccgactgatcggattgatcaggttggacggattggccgggctgctcaaataccggcgactgctcaggctgtgcctgcacatccggctgctggtccgggatggataccgcctcagcggatggtgcagtctcagattccgtctcggttgctgtttcagatgcggtcccagatacagtctcgggcaccttggcaacaggatgagcgatcacatccaccggcaccacggcaggtgcagaaggctccgccggttcgacgggttcagcttgcgggcttgtctgcggcacgaaatcagcggcaggctgggtctgctgcgcctcaccgtccggtacggcatcttcggactgctctgccatcgcatcggcgaacaaatcacgcggagtggccggctcttccgccttgaccacggattgggcaatgttcagactgctgaagtcgagttcgtcaaccttatgacgaacgctggcggcgctgaacgcagcggtcggctcaccggcccgcaaatccaaaatgtcgtcaacggacatatcagcggcatccggctcctgcggtgcttcattcaccgcgtagccgaacaaatcaggcaccggaagctgctgctcatgctcgacgtcatcgatacggatgaagtccgccggaacatcaccgaactgcatgcgcatcggcgaggacggcagcataaactcggcgtcaacgggcagacgcagtaaatcgccattgtcacgaaccacataagagccattggtcgagcctaaatcgcgcacggctgcagaaccattctgcttcacctcgaacacggcatgccttttggacatcgacttggtctgatccaccacatcaagacgctgcatgccgtcatcggctagaggacgcaatggcttacggccaatctccacgcagtcgcccggtttgacgttgactcgatcaaccccattgatccgcaccgtccattcactcaccgtgaccgcctccctatacacactatgaaccacactatgtgccattgtgtcatcttttactcggtttcgccggattatcccggtcaagaattgcaacttttgcgcattagcagcttccatgccgccagcaacgggtgaaatcgcccccccctattcagtacagggtctgcccaagggcacaatgcaggaaaccccgcaatccataacggatacggggtttccggcaacaagctggtgattgcggcttaagccgcacaaatcacttgagctcgacggtggcgccagcctcttccagctgagccttagccttctcggcgtcttccttcttagccttctcaaggacggccttcggagcgccgtcgacgaggcccttggcctcagccaggccgaggttggtgatggcgcggacggccttgatgacctggatcttcttgtcgccgacggcggagaggatgacgtcgaactcgtccttctcctcagcagccggggcagcagcgcccggagcagcaacggcgacagcagccggagcggcagcctcgacgtcgaacttctcctcgaaggccttcacgaactcggagagctcgaccagggtcatctcgccgaaggcttccagcagctcatcgttggtgtacttagccattatggcttcctttcaatcttggcggcggacgaagtaggtgatccgcagccgaataaaccttgtttgtttaaattatcgaagcgactgattcatgccgtgagggcgtaaatcaggcagccttctcctgcttgtcgcgcagggcgtcgatcgtacgcacggccttggtcggcagagcgttgaacaggtacgcggccttggccatcgatgccttgacgtcgccggcgaattcggcgagtagctgcgggcgagacttgaggtctgccagcttcttggcgccctcagcatcgtagacagtgccgtcagcggcggcacccttgatgacaagagccttgttgtccttggcgaagtcacggatgaccttcgcagcctcaatgaagtcgcccttcacaaaggtgatggcggtcgggccagcaagaatctcgtcgagaccctcgatgcccgcttccttggcggcgatgcgtgccagcgtgttctttgccacggtgtaggaagtatcgcggcctagcttttcacgcagatcggaaatctgcggaacggtaagcccgcggtactcggtcaggtagacggcgtcagcgttacggaattcctccgtaagctgagcgactaccgcttccttttcgggcctcttcatggcgttccttcctaagtcggccgttgacttggagttcggaactttcggctgggcaacaaaaaagccctgcgcacaggcagagcaatataatctcgcgaagcgaccttcgccggcccttgacgggcttatatctctcaacctgcgctggcttggcgaaccaaacttcgaaagtgcacttgcgcacacttcaaccaacggtctgtggtttacgaatgattaggttacgggcggtcggcgacattgtggaattcgggcgtgtcgcgcaggcagcaccccaggagagtggcacaacaaagtcctcccggcccagcattggcgcaacattcccggagaagtggtgcaggattacaacgtggcggcatattgagccacggatgccgtgacttcctttaggtaatcgagagaacgacgccaatggccgggcacctcaatcgaatggttggcgtctggatattcatgcacatgcggggtcaatgcgttggcgcgggcgcgatcatagaacgggtcggcggttccggcacaaatcagcggtgccggtccagcatatcgggagctggcggcgtgtgactgcccggcaagttcggcacggattgccgccttcgcttcggccacggatggtgcttcggattcggctacgatgtcatcgcccacagcgggcaccggaatcacgcgggcggatgggtcgaaatcggcgtggtgcaataccggggtcaacagcacgaatggcaacccataatgtgcggccacgtgcgggtaagtcatcgtggtcagcgatttgccgatgagcagcagacgcgggccggattgattggtggaatccgacaaatcagcagcgtccctaccgacattatcgttggagtattcgccggactgatttccgcgcactgactccacccacccgtcaatcgcctgattgagcaccggaatcactgtggacaaatcatcggaagcattgcgtacattcatgcgatcgacacgccacccggcctcgaccaaggcttgtgcagaccagtacagcagcggacggtcgcagttgtagccagtgcctggcatgagcagtacgcggccgtattcctgaccgaacttgacgacgttctttttccatgaggtgatgctgacttcgacggccggtttcactgcgcgacttccttccgcggcactctctgcgcgttcctgtatatgtattgccgcagtcagtctaccccggcctgttcacgttacctccacaagctataatcggccacggttctgattggatgcgtagcgccgcacgcgcgccgggcaggtcaatcagggcgagtcgcaattctcgccggggccaaccgggtcacccacaggtggcgtatggcctcgcacaacccaaggaagtagagagtatatggagaagttcttccatttgaaggaaaacggcacgaccgtctcaactgagattctggccggcctgaccacgttcttcgcgatggcctacatcatcgtcgtcaacccgcagattctgtcgcagaccggtatgccgtggggcggcgtgttcctggccaccatcatcgcggccatcatcggcaccctggtcatgggcctgttcgccaatgtgccgtacgcgcaagccgccggcatgggcctcaacgcgttcttcacctacaccgtgtgcttcggcctcggcttcagctggcagcagaccatgtgcatggtattcctgtgcggcttgatcaacatcatcatcaccgtcaccaagatccgcaagatgatcatcatggccatcccggagtccctgcagcacgccatcggcggcggcatcggcctgttcgtggcctacgtaggcatgctgaatgtcggcttaatcaagttcactcccggcgatcctaaggccgccgctaagggcggtgccgtggccgcaaccccgggcctggccaacttcaacgacaaggtgctgtgggtattcctcatcggcctcgtgctggccatcgtattcaccgtgatgaaggtcaagggcggcatgctgctggccatcgccgtcaccaccgtaatcggcatcccgttcggcgtgaccacctggtccgactcccagtctctcggtcagaccttctccgaactgccgcagaccttcggggcgatcttctccgccgaaggcttcccggccttgttctccgacccggccaagctgccgctggtcatcgtgaccatcttcgccttctccatgtccgacaccttcgacaccctgggcactttcatcggcaccggccgtcgtaccggcatcttctccgctgaggatgagaaggccctcgagaacggccacggcttctcctccaagatggacaaggctctgttcgccgactccatcgccacctcgatcggtgccatctgcggtacttcaaacaccactacttacgtggagtcctccgccggtatcgccgctggtggtcgtaccggcctgacttccgtggtcgtggcgatctgcttcgccctatccgtgttcttcgccccggtgatttccgccgtgccgtccgccgcgactgctggcgtgctggtcatcgtcggctgcatgatggccgcctccctgaaggaagtcaagtgggacgatatcgccgaggccatcccggcgttcttcgccgccgtgttcatggccttctcctactccatctcctacggcatcgccggcggcttcatcatgtactgcatcgtgaagacctgcaagggcaaggccaaggaagtgcacccgatcatctggatcgtatccgcgctgttcatcctggacttcgtgtgcatggcgattctgtgatgttggtttgatgacggcggtgaatcacgtcgttctaggctgatttgccgtaagccgtaacttatctagggccgggctcgaaatgagtccggcctttgttattgcagatatttaggtactagttagcagcgttgcaggtataaagggacttcttagagccgtatttgcctccttcataggcccgaaatacctgcaatctacttaatgtcgtctttatacctgcaaattcgcgtcataaatcgacctgaaatacctgcaaatcttatggattatggcggatgaccgatattcgccccgtaaatagacccaaaatgcctgcaacctatttatgattaggcgacccgaaaaaccattgcaggtattttggcactatttaggatagtatgcaggaaatctcgatacgaaaagtcccggtaagcagcttgcctactgagcctttcgacaaataacgggtctctctggcccaacaacaaacaaaaaagacccgccttacgacgggtcttactgtttttttctacgcacaaaccactacgctgcgcgcagggcgcgaatcttctccagtccaacaattatggaccggccggaggccggactcaacatcaccttcgctcagctatcgcttcgctcacggatcagccaaaacgaccagagatgtagcgctcggcttcttcgttctgcgggttgttgaacatcgtggtggtgtccgcgaagtactcgaggtggccgggctggcccacagccttcaggttgaagaaggcggtgtagtcggcgatacgggcggcctgctgcatgttgtgggtcacgatcacgatggtgtagtcgctcttaagctcgttgatcagatcctcgacagccagggtcgaaatcgggtcaagggcggagcagggctcgtccatgagcagcacctgcgggtgaacggccacggcgcgggcgatgcacagacgctgctgctggccaccggacagaccgatgccggggttgtcaagacgatccttgacctcttcccagaggttggcaccgcgcagagcccactcgaccagatcatcggcgtcggacttggccaggtggtggttgttcaggcgcacaccggccagcacattctcgcggatggacatggtcgggaacggattcgggcgctggaagaccatgccgacgtcgcggcgcacggccaccggatccacatccttgtcgtacaggttcttgccctcgagcagcacctcaccctcgacgtgtgcgccggggatgatctcgtgcatacggtccaaggtgcgcagcacggtggacttgccgcagccggacgggccgatgaaggcggtgaccttgttcggctcgatgttgatattcacatcctccacggccaggaagtcgccatagtagatgttctcgtggttgacgtcaatacgttgtcccatgatgtttccttatatttccttgtatctttaagtctaacggctcgctcagcgatcggtcttcacggcgaagaccttcgccacgattcgaccaatgaggttcagcagcagcacgacaatgatcagcaccagagcggcggcccacgcacgttccataggaatcgtggtcacgcaggtggaggcagcgttaggcgggcagttggcgctcagcttcgagtactcctgatagacgaacaccggaagggtggtcatctggccggagaacaggttcacattggtgttgacaatgtaaccggcggtcatgagcagaggggcggtctcaccaatcacgcgggcgatggccagaatggcaccggaaacgatgcccggcaaagcggtacgcaacacgattttggtgatggtgcgctgcttggtgacgcccaaggccagggatgcctcacgcaggtcattcggcacgatcttgagcatttcctcgctggacttaaccacggtaggcagcatcagcagggagagggccaccgagccttcaaaaccgttgatagtaccgggaccgagcaaaatcgtaaacatcgagaaggcgaacaggccggccacaatggacgggatgccgctcatcacgtcgacgagcagggaaatcgtggtggcaagcttgctgcggttcgcgtactcgaccaggtacacggcgcacatcaggccgatcgggatggagatgaccatggcacccgcggtgatttccagcgtaccgataatggcgtgcagcacaccgccgtaaccaccggatggagtctggctgccaccaaccacaccggtcatgttgtaggtcaggaagttgaggttcagacgcttgatgccgttgacgatagtggtccacaacagggagaccagcggcacacaggcgataatgaacgccagcgcgataagcacccacatgaagatatccatgctcttgcggcgctgcacggaggaacgggtgggtcggaaacgatcgaaatcgatcttgggagcaccgtccatcggagtcttttcagtattctcagcagcagtcatcacgcagtcgctttctcggtgattttgcgggcaatgaagttgaccacaaaggtgatgaggaacagaatcagaccggttccaatcagcgtggagacgcccagctcgttggcttcaggatactgtgcggcaatgttcgcagcgatggtctgattctgcgaggcctgcagcagtttgatggagtaattgagtcccggggacagaatcatcaacacggccatggtttcgccaagcgcacggccaagggccagcatggaggcggacacaatgccggacttgccgaacggcagcacagccaggcgaatcatctcccactttgtggcgccaagcgccagagcggcttcctcatgcagacgcggagtctgcatgaaaatgtcgcgggacatggaagtaataatcggcagaatcatcacggcgagcaccacggccaccgtggccacggtacgcgacgggttcgcagcagggccggcgaacagcgggatgaagcccagatgattggcgacccaattccagaacgggtagatggccggcaccaaaatcaggccaccccacagaccgtagataacagaaggaatggcggcaagcaaatcgaccacatagctcagtgcggtggcgagcttcttaggcgcatagtgcgagatgaacagcgcgatgccgatggagacgaaaaaggcaataatcagagccagcacagagaccagcaccgtgccgaacagcaacggcagcacatagccccagaaattgttggccttaccgccggtgaagctggacacggtcttgctgttggcaacctgatcgccgccaatcaacggccaggcacggaagaacaggaacaggaacacagcggcaagaacaaccagaatcaggatgccgcaggcgtatgccacaccgcggaacaccttatcggcggttttgccgccgactggctgcacagccgttttgtcttgcgaactcacggattctccttatataggatggttatcaagtattcaagcggcacggttttcgtcgtcaaaccgttcggcccctgacccgctttaagccgcagccgtatgtgtttacgactgcggcttaaagatttcgggctattgcaatttcaatagtcttgtattcaattatcgtttcaggtcagtggttcagcaaccctttgcgggtcggccgctcacttggtcttgatggcctcgatggacttggtgatctcggacttcagggaggagggcagcggagcggtgccggcggcatcctgagcggccttctggccttcgtcggaggtcacgtaggtcagccaagccttggcgaactcagcctgcttggtgtccttgtatgccgggcagacgatgtcgtaggataccaggacgatcgggtaagcgcccttggcttcggtggcgtggttgatcttgatgacgatgcggttgtcgcccttcacagtgtcgtcctgcttggagtcctcgatgaccttggagccggcctcagcggagatctcgttgtaggagtcgccgaccttgacggccacggtgcccaggtcgccgacctgggagaagtcggcgtaaccgatggtgccatcggcctgcttgacggtggagaccacaccagaggtgcccttggcgccctggccaacctcgttcggccagttctcggacagatcgtaggtccaggagtcaggagcctgatccttgaagtaggagacgaagttctgggtggtgccagacttgtcggaacggtgaaccacggtgatcgcggtgtcaggcagggtcaggtccttgttctgatcggcgatggccggatcgttccacttggtgatcttgccgtcgaaaatcttggcgatggtgtcggcatccatgttgatgtgcttgccagcatcggagacacccttgaggttgaagatcacggcgatcggggagacgtagaccggcacgtcgaaagcggtgccatcggcgcacacggacttggactgctcgacctcgtcatcggcgagggccttgtcggaaccggcccatgcggtggcaccggtcaggaaggtctgcacgccagcgccagaaccggacgggttgtaggcgatcttggcgtccgggttggcgccctggaagccggcaatccaagcttcgacggcggactgctgggaggaagcgccagcgccctggaagttaccggaaatcggagcggtcttggaagcggaatcagtggaggagctgtcggtcgtggaagcggtgttatcgccgcaggcggccacggaagcaagcatcacaatgccggacagggcggcaatggagcgaatgaggatgttcttctgcatgattatttcttaatccctctatcaactattcgcgggcggctcttgctgcccggtcaactcatgacaactaccagattattggtggttttggggtctcgaaaccgaaatcagtaaacagaagatgaacagttggatgtttgtgggtcacataaccgctacgtagtttttatcaccctgacccttcacgggaaagaggccatcatacgaaaaggcgacctcgaaatgtcgcctttcatcatccggcaaacgccctttactccaccggggcgtcgatcttgtagccaagcccgcgcacggtggtcaaatacttggggtgtgccgggtcttcctcgattttggagcgcacgcgcttgacgtgcacatcgagcgtcttggtatcgcccacataatccgatccccaaatgcggtcaatcagctgatgccgggtcatcacacggcccttgttctgcatcaggtattcgagcagctcgaattccttcagcgggaagaacacggtttcgccgcgcaccgtgacctggtgctggccgacctgcatggcaatgtcgccgcacaccagcggaatatcgtcgtccaccgtgccggaagcctgcgccgtggcctgattgcggcgcatcaccgcacggatacgagccagcagctcgcggaacgaatacggcttggtcacataatcgtcggcgccaatctccaggcctacgaccttatcaatctccgcacttttggcggtgagcatgataatcggcacgcggctttgctcgcggatacggcggcacagtgcggtgccgtcgatgcccggcagcatcagatcaagcagcaccaggtcaatgcctcccttggtgaacagctccagaccttcctcaccggtggcagcagcggacacgtcatacccctcgcgtgtgagctggtacaccagcggctcgcggtaggattcctcgtcttcgacgatgagaatgcgcgccatagtggcctttcttgggtatgttcccgtacgcatcggtgcaaaagtatcagacactatcgtaaccatgagttctccattaccctgttgtttcctggaagtacgtaattgcggatacgcgctacgcgccctgcacggcggtaggttcctcatctgcaggagcggccggcagctcgatggtgaacgtggagccctcgcccttgcgtgaccacaccgagatccggccaccattctcctgcacgcaatgtttggtaatggccaggcccaagcccgagccaccggtttctcgcgagcgggctgggtcgacgcggtagaaccgttcaaaaacgcgatccaatgacttctcgggaatgccaataccctgatcgaccacgcgaatggtcactttgccatcgcgctcccccacaccgaccgccacagtcgtgtgctcaggcgagtagtgaatggcattctcgaccagattcttgacagcggtttgcatggcatccgcatcagccataatcatcagctctgtttcgctcggctcatcatcgccttcgccagccgaaatcggcacgggtttgccgttgacattaagacgaatatcaatatagcgggcatcggcctgcacctgattgtcattgatggccgcgcgggctacagcaagcgcggaaatgcgcttggcatcaagcacactaccttcggaagattgcgccttctgcaaatcgatgaggcgacgcaccaattcggtcaaacgcgcggattccttggaaatacgaccggagaaatagcgcacggcgtccggatcgtcggcggcatcggtcacagtctcggcaagcagcgagatcgcgccggccggagttttcagctcgtgggacacgttggtaacaaagtcgcgccgaaccgcctcgaaccgacgctgttcggacatgtcattgataaagatggcatacaggtcatcgccaatatcgccaatgcgcacgcgcaaatacagcatgttggatggcatcgactgccccgcttcaagtccccggccgtttgaggaggggaagacgctacgattgaccggcatctgcacttcgcgctctcgcacaccgccgtcggtggcggcttgggtcagaatgtcttccacttcgcgagagttgagccggttgccggaaaccaggccgaacggcaccgaaccagggctggcatactgcactcggccattgcggtcggtgacaattaacgcttcgggcagcacttcgaccaatcgacgctccgtaggacgcacgggaacatcgtcgccaaacagacacagtgcggtctcgtcagatgctgcagcctgctgcgcggacacacgcccggaaacacggcctttgttataggcgataatggccacccacgccactaccagcgcggcgagcaccacaagcacgatgatctgccagatatccatggtttccagagtaaaacgtgcaagacgtagcttagtgcccaaactacgtaagttcgcctattgttcatttttggcgggacgaatatagcgaagctcccgctggcgggggctgtcgaacgcagtgagactggggggtggtcagggaaccaaaatcccagcggccaccctcagtccgcttccgcagacagctcccgccagcgggagcacaatatcgggagcaatttacagctcgtagtccttgtccttgctttccttgatcaggaacagagcgagcagggcgagagccgccatgatggccatgtaccaacccacaccggcaacgccgaacttggagttgaccagcgcctgggcgatggtcggggcgaacgcgccaccgaagatggcggcgaggttgtagctcaggccagcgccggagtaacgcacgtggaccgggaacagctcaggcaggtaagcaccgcaaggtccgaacagaccgcccatgagcacgaagccgatgcagaggaacacgagaatatgtgcggcggagtgcaccagcaggaacggggtgaagaagctgaacaccagcgtggcggcagtcacggcaagaagcaccttcttgcggcccaccttgtcggcgtacacgcaggaaaccacgatgaagatggcgaagaacaccacggagaccatttgcagcagcaggtattcgctctgctggaagcccaaacccttaacgccgtaagacagcgaccaagtaccaagcacgtagaacagcgtgtaggtgatgcccatggccacagtgccaagcacgacttccttccagtacggcagcaggtcgcgcagcgggtgcttggaggtgcgcttttcttcggaagccttctggaacaccggagtctcagacatacgagcacgcacgtagaggccgatgatgaccagcacaacggaagcaaggaacggaatacgccagccccaggcgcccatctgatcctgaccaagatgagtggtgagcagcaggttcaggccgtacgcacagaagaagccgatcggggcgccgaggttcgggaaggaaccgtaaagggcgcgcttggaagccggagcgttctcggtggccaccagagcggcgccggaccattcgccggcgaggcccacaccctggcatgcacggcacacacacaggatgacaacagacacgccgccgacctgctcataaccgggcaggcagcccaccaggaaggtggcgatacccatggtcagcagagcaatcaccagcgtcttcttgcggcccatcttgtcaccgaagtgaccgaacagcatggagccgaacggacgagccaggaaggagacagcgaatgtggtgaacgccataatctgagccagtgccggattggtgacgttggcgaagaagatcgcgccgaagtagctggcggctgcgatggagtaacagtagttgtcatagaactcgatggcagtacccaccatcgaagcggcgatgatctcaggaaccgaatccttcttcacgggttccgtcacggccgcagttgcacttgcaggcataatcctttttctctcctcacgctgcgcataaacctcaacgcagcacatgcattgcatgttcaacgcttcgcgacagtgttgccatcgctcaaagaattgagcacagcgaccggcatgcgggagaaagactggttatggcttgtggccccagcgatgaacccccacacatcgctgtgccgcacactgagtatggcgcagctgatgagccgagggcttgagagcgctcacatagtgaacgcgtcttatgggtcggactgcctaacgcccctacagacgcttgacgatatcaacggcgagacgggcggcggtatcggcgtattcggagatgtcgaattccttgaacacctcatagtcggtgtcggcattgtcagaaagcgcgcgaaccaccagagcaggcacgtcattgcgggcggccacctgggccactgcggcaccttccatttccacggcatcagcaccggtaagacgaatgacttcctcgaccttttcaggcgtgtccacaaagtaattgccggaggcgatgataccgacgatgtgggtgatgccggcctcggcaagcgccgcgtcagcaacctccagcaggtggtcgtcggagtggaattcctcaaccggagcatcggcagtgccgggcttccactgccccacgagtcgcatgtcggtgtcgaggtagcgcaaggtgccgccaagcaccacgtcattgatatgcaggtgggtgttgaggttgccggcaatgccggtgaaaatcacggcatccggagcgaactcgtcaatcagcagctgcgtggtggcggctgcattgaccagccccataccgcctaccgttgcggcgaccttaatcacgtcggatccaaaagaatccacggtgccggagacgatgtcaaggctgcccttggcggtgtgggtcacgtgcgtgagcgatttggcaatcagcgccacttcctcgtccagcgcgccgataatagccacggtcttcatacccatacgtaagttcctttcatacaggctcccgctggcggggggctgtcgacatagtcgactgggggtcgttaaggtgtctcgctcaaaccacccccagtcttgtttcgcgagccagcccccgctagcgggggcataaatggctcagtgccaccgccgcgtcgccacggattcggcaagttcgcgcagtagtgcttcggtgtccggccagctaatgcatttgtcggtaatcgacttgccgtacaccagctggtccagtggcgcggccttctgattgccgccctcaatgaagctttccatcatgataccggtgatgccttgttccccagccgcaattcgaccggcgatattgcgcactacttcggcctgtcgatgctcatccttgccagaattgccatgcgagcaatcgatgataaggccatgggacgcagccgattcagcgggcatttcggcacgcacgtcacccatggccttagccacggattcggcatcgtagttcgggccgtacgcggaaccacgcaataccacatggcaatccgggttgccgagtgtctcgactgcacaggcacggcccaagtggtcaatgccgaagaacgtgtgctgttgggcagcggcgaagcaaccgttcacggcggccttgaccgagccatcagtggcgttcttgaagcccaccggcatggacaggccgctggctagctgtcggtgaatctggctttccgtgttgcgcgcgccaatggcaccccagctcaccgcgtccgagatgaactgcgggctagtaggctccagaaattccgtggcagcggccaagccctcatccaatacgccgagcaaagtcttgcgcgccagcaacaggcccttcttgatgttgtggctgccgtcgatatccggatcgttgatcaggcccttccacccgacggtggtacgtggcttttcgaagtacacgcgcatgacgataagcagctgctcgccgagctcatccttcagcgcagccaatcgatgagcatagtcaagcgccgcctgcgggtcatgaaccgagcaagggccaacgatgaccagcagccggtcatcttgaccgtacagacatgcacgaatttcgtcgcgcgaataggcgacaatctcctgagccttatcggtcagaggaagttcggcaagtacctgagccggcgtgggcagcggctcaagctccagcaccctgcggttgatgatgcggctgacacctacctggtcctcccagcgcggcacgtccgtggcgatgagcgggttcttgccctctcccatggcctgacgaatcgcgcgaagctcctccggcgtattcaacggctgcgggccgacctgcaacgggtgcgtggccgtggcgctgccatcctgctgctgcataacatctctccttggattattatctttcccaaggatagggtgtcacgggaacaaacccagattgtcagcgatggagcgcgcggcgagtcgtgacggcgtcggccagcgtgtgcaaaagctcgttggtgcgatcccacggcacgcaggaatcggtgacggactgaccgtacaccagttgatcgagcggggccggcttctgatggcctcccaccaggaagctttccatcatcacaccggtaatgccctgttcgccggccgccaaacgttcggcaatctcttcgatgaccccggcttcacgattctcatccttgccgcagttgccatgggcggcatcaatgacgaggccatgctggctggggccggacgccttggatgccttcagatcctcgagcgcctgacgcacggatgcggcatcatagttcggaccatggctggagccgcgcagcaccagatggcagtccgggttgcctttggtctcggcggaaatcacacggccatcaagattgatggataggaagtggtgctcaaatcctgcggcatagcaagaatcagcggcggccttgatggagccgtcggtggagttcttgaagcccaccggcatggataggccggaagcgagttcgcggtgaacctggctttcggtattgcgcgcgccgatggcaccccagctgatcgcgtcgcagatgtactgcggagtgatgggatcgagccattcggtggccgtgggcagaccgaggctcagcacgtcggtgagcaccttgcgggccagccacatgcctttgcgaatattgaagcggccatccagatcaggatcattgatcaagcccttccaaccgatggtggtacgcggcttctcgaagtacacgcgcatcacgatgacgagacggtcttcgagctcacgcttgacggcggcaagcttttcggcgtattcgtgcgcggccttgggatcatgaatagagcaggggcccacaatgaccagcaagcggtcgtcgcgaccattgagcacgtcacgaatctcctgacgggagtgaagcacgagctcgctcatctcatcggtgagcggctgctccttgaggaaggcgcgaggtgcgggaatggggtcgagctggcgaatattgacatccactgtctcgggaaagaccgcctgctcccccaaacgacgttcgtcctctgaactatcaggaccacgcagtgctgccattgctcgactcctttcttcttctatgactataagttaggcctccgtgcgtgttgcacgaaggcctaactatagcagtttgtttatgctcacgctctccgagccccacaattacggactcgcctttcagctccggcctgctggccgggaagccgggaaaacagtccactggacagttttctatttccggcttctcacattggccgacgcacgcttcgcgtgctacttggccaatgcgcccatcggatcccaagccggaagcatggtggcgggctcttctaaagccttctggtattcggctgggagcatgctcttcggaacggcgacctcgtagacgtactcggtgaaccagtcgtcggacatggtgaagtagcccttgtcggcgatcttggcgccccaggagttctccacgcgccagcggcgggtggcgccatcgtcggcaacgtccacaccggcgaatgccatggcgtggttcatggcggaatcgccgaagcgtacgcgggcttccttatcgaggtcgaagtccacgtcgtataccttgccgtactcgaacagatcagtggcccaagcgccggattcacgatccatgaacgggtggcagtcggcaccgaaccacaccggaatgccctgctcgaccagaatctgcttgacgcagtccttcatgaactggttcggcacgttgaggtactcggtggcgtcgccgccggccacgttgccgaggtgctcaataccgatcttcttgcccttggcgtgctcggcgcgcgggtcgtccaccaggcacacgtagtcctcaagaccggcaggccccacgtacttcttccagaactcgaccggcgtaatctcgccgtcgcggtggaattcgccgtccgcgtcagtccactcccagtcgaaggagaccggcggctcgcccaggtggatggtcaggatacggtggccagcagcagtggtctcggcaatgatctgctcgaccttggcggtgtcgccttcggcagcgtacatgtgcgccacggcggtgtgcagcaggtgacgaagctgggtgttcatctcgccggtgttcttggaggattcggtctccgggaacagatccttgggcacggcaccgtacttcttgtacacgttcatggccatggtccactggccgccgtcgcccatcacgtcggcgagcaggtgctggatcaggcgggagtcagcaggctcgccggcctccaccagagctgccacatccttgaggaagtagttgacgcgctccagcttgtcgtagtacatcgcgtagttctgggagaactcgaactccttcaagttcatgttcttcttggcgatgaagcgggccacgttcagggaactgaacagccagcagcggccggagcgatcctgatgggtggcctcgccgttatccacagtggtggagaagcgacgctgcagcagacgggcgcgatcatagttgcgggccaccttgtcgattccagcggcggtcaccgcgttcatggccaggcggctggtaccgtcggcgtcaaattcgctgcgcagagtgttcagcgcttcgccagtcaaaggcgtcaattcactcatgtctattccttctttgggttcggtacgcttgtggcgcaatgttcacaacgattacggcacctggcgcagagcacaggtgccgtatatcttgccgttagtagtctaatcgatggcttgtcattcagcctcgggctcagacggttccgactggccggcctcgtcgccctgttcggcgctctgtccatcggtttcggcgtcatcaggctgcgcctgttcgtcatccgattcctgctgctgttccggaaccgggttgaccaccggcagcgaggcagcggcatcgccggaattatcggcgctgagaccgaagccggagaatgcctgggcgaacatcgcacgcagttcggaaacgcgttgggtaatagtggcctcacgcgactgcaattcggcaatgcgcttggccagcccgtcaagctcgctttgggccgcgttacgacgctcctgaatctgattgtcggcgtcctcacctgccttgcgcacgatctcagccgcctgttcgtcggcttccttacgcttatcggccgcataggagtcggcctcttcacgggtgttcttcgcctggccaaccagttcatcggcctcctgcttggcggcagtacggcgctcctcgaggttggcgagcaactcgttgactttcttggtggcctcatcctgctgagcggcaatgtcggcacgaatctgttcgacctcggcagtgacctggctcatcgtgctggtgcggttgacctcggcctcgtcggtgatctcctgagccttggccttggcagtatcggtgatctcgccggccttgcgctgggcctcggtcatcatcttggacacctgctcgcgtacatcggccagcttcttgttggcatcggcgagcgccgcttcgatctggtcattggaatcggacttgagcttggcgatttcctcgttggcgttcttgcgcagctcggcggtctgcctggccgcttcggccctcatctcggcgatttcgcgctcttgcgtagagcgttcggaggcaagcttcttatcgtgttcctcacgggtgttgctgagctcaagttcaacggtctgacgctgctcggtgacgttcttggcggtctcagcgcgcagctgggcggcatcctcgttggcggcagtggtgattgattcagcctgattgttggcatcctgcaggatggaagcagccttggcattggcatcatccacaatgtgctgcgcgtccaacttagcgttgttaatcaacgtctcggcttgagcttgcgcggtcatgcgcgtggaggaggcgtcctgcttggcgcgttcgagcagctcggaactggtctgctcggcggaagcaagcatctgctgagcgttggcgccgagcgacgcgaacgtgttgccctgcgacttcttattgcgctcctcctgcaattgggcctgcaattgcagaatgcgatcatcatccgcggcaatctgctctcgcatgttggccagcgtgcgatgggcctcgttcacgctatcttgggcaacctcgaatgccgcgtccaccttctctttatcgtatcctcgcagcaccaccgggaaacggtccaccatgtctgtccgtcctttcacatacgcaacttgactcgtcctcaagcactgtagcgtatgaaagcatgctgaagctggggacggcgaacatcgttacaatgcgtgcgaaacgtgttcggttttggtgtggcggggtgagactcaggcaatgaggatatcggagctggagggcttgagatagtagcgcacagcctcgcgcaccacgtctcgcccagcggcaatctgctgttccagcggcaacccgttctggctggaatgcgccggccctaccaatgggaagctcacgaatcctcccagcacacgttcctgagtggcggtccaattgagcaaattgtagaacagcgagttgcatacgaatgtgccggcatcagagcttaaggtggccggaatcgaatcgtcggcaaagtcattcaaaatcgagcgcaatggcagacgcgtccagtaagcggccgggccatcgggatcgatgggctcgcgacgcggagtcacattgtcggcgtcaggtttggccgtatccatcaaattggtggcgcagcgttccagcatcacaccacgggccgaatgcttgagcccagtggcgatgacaatgtcaggcctcgtggcctcgatggtctctttgagcgtgggccaggctttggcgaaactcaccggaatgctgaccacatgaatggtcacctcaacctgatccaacgggtcgtccggactggaggcaggccccaaaccctgctcggcaatggccttgggcacttcgatagccggattaacgtccacaccgtcatagtggtcgaatccggaaatcacaacattgagttcacgcatattggtaagtctaatatctcttcacgggtttgaggaggtcagcgcatctggcctgcggcttgggcgaggagcgcatgcatgcgggcgcgcgcctcttccttgggatctcgtccctgaatttcctcggcgatatgttcggcggtgggcacatcttccagcgtggtgatcttgagattcgtctcgctgccggacacaatggcaaccggctcgtcaggcagatagtcgaccactacccgagtgtcatcggtgggatggaaatccggatcggatgcggccagttcgtatgcacggcgaatcgtggcgaatcggaacgactgcggtgtctgcgcacggaacgtgttcgggcgatccggcaccgatttgaccactttcacatcgccgagatcctcggtcagcagcactgtatcagtggaagcatatgccacggttgcggcggtgaactggtcgagcgcgtcaatcgacccctcgatggaggactgctccacaaacggtcggacggcatcatgaatcaggatcttggcgtcatcgggaataccggcggccgccaacgtgtcaagcgcggcggcggtgctgtccacacgttcggcgccaccgtcgataatcacgcgcactttggtgtatcccatatcgtcaatcagcgattcgaccgccgaacgtaccttgggattgaccaccaccacgatgtcactgacacgcccgcaacgctcgaacgcctcgatgctccagcacacgatgggcttgccgcccacagagacaagctgcttggggttgtcggggtcaaagcgggtgccgaagccggccgccagcaccacggccaccaccggcgcggtctgtgcgggtcgggcggctgcggtttcagggatatcggagtctctctcagtcatagccaccaccgtaaggggaggtctggccgttcgtgacctgcctcacagctttctccacggaatgtgcccgctattgccgcacgatgagagccagcaggcggccttcatgggctttgccggcgagcgcggcgcggcggtgggagtaccagagcggattctcgagcgtgcacatactgtggttgatgttgccgatgcgctccgcaagctcggccggcccctcaccgtcggtgcggcacagttcagcaagttcaggatccgcctcgaggtattcggtcgcagcatggacgcgcggcatggaatcaaccacctgatggacaccggcaaaggcgaggtcaatcattgcggcttcggcgatatcaatgccggcaccgccgaagcgtgtctgcgttttggtcaacgggaaacgcttgacgaactggtcggcgacctcatcgcccacctcgtagcaatcaccgcagatacgcgggccgagtgtagcaatgatgttcgtcggatcggctcccttgagcttcatcagttccacggtggattcgatgatgccgcgttcaaggccacgccgtccgcaatgagccgcgccgatgacgccggtgaccgggtcggcgaggagcaccggcaggcagtcagccgcgaacatacccagggcgatgccggattgtgaggtgacttgcccgtctgcctcgatgacctgcgacacattctcagctgacccagtgggttcggtcggctcgtgcttacgaccatcggcatcagtctccatgccacgacccgtctgatattcctccacactccggtgggtgccggatacatcgaaaccaaatggggtgttgacaacgaaggaatcatccacatccacagccacgccggaatgcacctgcgagaccagcgacaggcgtgcatgcactgcttcagacaaggcaatgcggttcgacatcacggcctgtggattgtcgccggatttgccaccgaggttcagattgccgtaatcaccggcgctcagccctcccagccgcgtggtgtaaaccaccgtgataccgggagctagcgcaatcggaatggtcaccggaatcgggcgaccctccttatcagtggagctgatctggttggagtcgaggatttcgtcactatattcaggcatgttcgttcctttattcggctttgagcgtgggcttcttggtacgcgaacggatggcggcgttgatgggcacctgatgcgggcaaggcatcgaaaacacatgcgccggattattgatggcgggcaccggtgtgccgtctgcatcgcgcagaccgtcttccggcacaatgtatgccaacggacgctcaccgggcaggaggaattcgacttgctgaccgggttcgattttgttgcggctcatcagtgtgacgcggccgccttcgtctgcgctccagctgagcacttctccgactaccagccaggaacggaaataggcggagcggtcagtgttctgcgtgactttgtgctcggggtagtagaagccggtggagtagtcacggtgggctactttgtcggtttcttcgagcagccattcgggcagttcgacgtgaggggccgggcgaacggctgcgtgcttccaatcggtctcaatctgttcgacggcggtgttggacttgcgacgcgtggaacgggcatgcgaactcatgccgtcgggctccggcgcatcagacgtagcgacggcacggtcatagccttcatcggccacaccggcgaatgcggcgtcggcattgcgcattacctgatcttcggttccctggccgtaatcagggtcggacgggcggatcacgcggtcgtggaacggcagcaagatattgccgtcagcatcttcaaaaccgcgctgaatcatgtattcgttgacggcggtcttgtaggcgttggtcatcgcggcgatgtagtaggcgcttttcgcacggccttcgattttgaggctggtggcgccggaatcgatcagatcgtcgaggtggcccaacatgttcatgtcctgtgagttgaacaggtaggcgccgttttctgtctgctcgatcgggaagtactgtccggggcgtttcttctccacaatcgagtacttccagcggcagggctgggcgcattcgccgtggttgccgtcacggccggtcaggtagttggagaacaggcaccgaccggagaacgccatgcacatggcgccgtgcacgaagcattcgatgtcaaggtcatcgggaatgttggcgcggatatcgcgcacagcctgcaagtccatctcgcgggccagcaccacacggcgagcgccgagctcatagaacgcgttggcggcctggtagttggtcacacccgcttgggtggaaacatgcagttcgaggttcggggccacttggcgggccatcatcattacgccgatatcggagacgatgagcgcatccacgccggtgtctttgagctggccgatgtattcgcgcatggcttcgatctcgttgttacgtggcagcacattgcacgtcacatacacgcgggcgccgcgctcatgggcgtagcgcgagccctcctcgaagtcctcaagactcaggtttttgggggccgagcgcatgccgaacgctttgccgccgcagtagacggcgtcggcaccataatcgaccgcagttttcagaccgcgtaagttgccggccggagacagcacttcgggctttttgcgtgtggggattctcatcgtcgtattcatcaccgcaatagtgtagtggtggccgtgtaatgcgggcggggctaccgttaggctgggaagcatgaagatcgatatcgtgagcgtgtttcccgagtattttgaggtgatgaacctgagcctgatgggcaaggcccaggccaaggggctgttggagatcaaggcgcacaatctgcgcgactggacccacgacgtgcatcattcggtggacgatacgccggtgggcggcggcgccggcatggtgatgaagcccgaagtgtggggcgaatgtctggatgagctgctgggactttcgcagcagtctgactcggtcccagctccaggtattgcagctgactctgacgccgatacgaaccaatccgacaatccggtctccgctgccaacacgcgatcggcatccgtcaacgttcccgtttcttctgacggctctcctgccgaaagtgacgtgtccgcccagctaagcgcaccagtgctcatcttcccgaacccgtcggccccgctgttcactcagcgcgacgccacggaactcagtcatgccaagcatctgctgttcggctgcggccggtacgaggggtacgatgcgcgcattcccgactactaccgttcgcaggacatcgatgtgcgcgagtattccattggcgattatgtgctcaacggcggcgaagtagcggtttcggtgatgctggaggccattacccgccttatgccgggcttcatgggcaacccggattccattgtcgaagagtcctacaccggcgagggtgcgctgttggaacaccatcagtacaccaagccggccgtatggcgcgatatcgccgtaccgaatgtgctgctttccggagatcatggcaaggtgaatcgctaccgccgcgatgaggcgctggcccgcaccgccgagattcgcccggatttgattgcggcgctggattgcaaggcgttggataaggccgaccgcaagaccctgatggctttaggttgggaggtctccgccgcccacccgcgcaagttggagtaggctacgcctccggctcaatcgcctcaatatagaacacagcggtttcgccgtagttgcgactttcggtgattttccagccctcaggggcctgcggatcctccgatcgcaccgaacgttcgagcataatcaccgtgttggtgttagtggcgctgcccgccgccaagtcggccagaagctggttgcattcgtcggttccgtaagcgtagggcgggtcgataaaaatcacatcgaacggctcgccaaaaccgccagtcacctgctcggcctttttagtgagcacacgggctttcagcgaggcgtcccaagaacggtttttctgcagttgcgcgaacgtcttggcgataagcgccgccgcaggtcgggaactttccacggccaccagttcacgtgcgccgcggctcaatgcctcgatgcccagtgcgcccgtaccggcgaacaaatccagcacacgggcgtcgtccagcacaccccatgaatcaagatgggagaaaatcgcctctttggtgcgatccgtggtgggccgagtgccggttttcggggtggcgagtgccgcacccttgaatcgtccagaaataacgcgcatgtctaccagcctagcggctgctcggaaccatcgaactcgttaatacggcctttgcaatattctgactgacggccggcttccccacggatctctcataattgaggcaatcaaggcacaacaatcgtcaatctggccttcgaggggctgattggggcatttcaggaggtctatctccgtttcaaggggcttctcaagcacgaaacatcgagtataaacggtctaatgataacgtcattccgccgttttgtgtccatgtctactcagccaccagccccttgaaacggagatagacttccgggcaaccggtgtatctgcccctcgaaaccgagaaggcctcagctggaagtcaaaaacgtctcgttgcctcgggtaaagtcgaggaccgctccggcaagctggacttcgccggccagttcggggtcggcttcgagcagctgctcagcacgggtacgagcgtcggcgatcatgtcggcgtccttgaccacgcgcaacagcttcagactggacttgccaccggattgggcatctcccaacacgtcgccggcaccgcggaattccaaatctgcctgtgcgatttcggccccatcaagcgaattgtggatgacctcaaggcgctgctcggctggcgagcccggctcggcacgggagatgaggaatgcccacgaattggtgccaccgcgccccacacgaccacgcagttggtgcaactgggacaggccataccggtcagcatcgaaaatgactatgcagctggcctgcttgacgtccacgccaacttcaatcaccgtggtcgagaccagaatcggagtctcgccgctggcgaagtcagccatgacttgggttttgacatcatccttgtctcgaccggtcaatgtggcgaaacggatgccggcaaactgcgggagcttctgcaatcgatctgcgatttcggctaccgagtgcaacggcgggcggactaccgtctcaccattgtcgtcgaaagtctcatacggatcatcgatgccaatgtcatcggccgatgcgcgggatgtccgcgaagaagccgcccgactggatcgcccgcttgaacccgctgaaagccctcgcgaacgccgcgcggaatccgctgccgacacgccgccgtcatcttcatcatccgtatcgatgcgcgggcagacgatataggcccgctcccctgcatctacacgcgcacggatatgcgcgaacatacgccccatcgtgcccgcgtcagcttcgttaaccaccaccgtgcgaatcggtttgcggccaccaggcagctcagtgagccaggaaatatcaagatcgccaaaccaagtcatggcggcggtgcgcggaataggcgttgcggtcatcaccagcagatgcggcgtggtgccgtcatcggttttggcattgagactttcgcgctgttccacaccgaatcggtgctgctcatcaatgaccaccaaagccagatgtggtgcttggaacgtcttggagaacgccgcatgcgtagccacgataatgcccggctcgccactggccgcagcagcaagagccttacgccgggctgcgagtttcatgccgcccgttagcaacgtgacaggaacattgaggtcggcgaccatcttgccaatagtctcaaaatgctgttcggcgagcacctgagtaggagccacaagcaccgcctgataccccgcgccgaccacttgcagcatggcggcgagcgccaccacggttttgccggatccgacttcaccctgcaacaggcgttgcataggccagtcacgagccaaatcagcggcgatatcttcaactacctgatgctgaccagcagtcagttcaaatggcaaggatgcggtgaaccgatcacgcaaattagttacggccgtcgtgctggctgcgccggtttcattatcgccgtccaacaggcacggatgagcagacgacttatgagcatgttggcgggccttcagtagcgatgcctgagagacgaacgcctcctcgtagcgcaacgtctcaatggccgctttgaatcgcacggtggagtccgggtcatgaatggacaagaacgcctccgccctgcgaagcaggcccttggccgcgcgtatggatttaggcagaatatccgggatggactgggcgagtgcggcaaccttggactcggattcctcgccgtcctgcaccgcgatgttgtcggtggagggcgcagcgagttcggcgggcatgctttggctttcaggcacggatgatgtgcgcgcacccatcatccacaacagccccagaatcgtctcgtgaatatgttcggacgagatacgtgagctggcatggtaaatcggccggggccggcagacgcgggtgagggcgtccgccacggtgtcggcatcatatttaagcgtcgaagcgggccaatcggcggcagactggaaattcgcgtatgggccagcagagcccgtggatgcagaatcggccgcagcatcaggaatactgttcttgccccccgaacccgtcgctgttcccgccggcccgggcgcgacggtcacaatatccgggtgggtgaactggagttgacccatatattcactgggcacaccagaaacgaccagaatcggactcgacttgaggcgtctcgccacccagtcaacataattcttgcggccgccaaagaatgtcagttgtgcgatacctccgggcatatggcgagtgcgcgcataatcggtatcgtccacagtggcgatgacacgtgacatgcggccttgcaccacccgcacatcgcgcacctgagcggcaaacgccatttgctggccgatcacggcctctcgaatcgtgcgcagtggcaccggttcggtgacgcggaaaggatagtaggtgagtgcctcgcccacagtggtgacgcccagcgatttgagcgcggacacgcgacgcttgttgggaaccagcgaagcgagtgcggtgtccatggtgatactcatagcgctccattctatccgtaagccctcgaacggcatcacctacaacaaaacccgccgagccgaagctcaagcgggttttgcagacgttagtacgttagtacgcgattcacgcggccacgcgctgaaccttgccggccttgaggcatttgccgcacacgcgcaggcgagtgttctcgccgtcgatcgtggtgcgcacggactgcaggttcgggcggaagctacgcttggtacgacggtgcgaatgggaaacggtgaaaccggtctgcggtcccttgccgcacactgcgcaacgagctgccatgatggactcccttaaaccttgatgtgtcaagtctttcacgtatccggtcgctggttttacccggcaggccgaacacacaacttcacaaatatatagctcaataccgacaaccgcaactcttgcgtgtatcatgcccgactcatcatcgcggcatgctctgcatcaggctcgtgtgaagcctctattcgccgccatcccgcgcactacgccgtccgcgaatcgccggcaaaacagtcatattatccaatacaacacgccaccttgtctattccctatccagcaagctcccatataatttcgatataagagatggcacgggaacgaaggggggctccccgtattcgcggcatacgcactgcaactgctacgactacgaccgcaactcacaacgaaggaggttgtcatgttgaatctcaggcgaggcatcggcactcatgagccaagcgtgatctcgttgggccaagtgtgggtagacatcatgctggatgtggacgagataccggaacagggcggattcgctgtggccgaccatccgaagcccaccattggaggcagctaccgagtgctgcaagcggccagccgcatgggcgtgccgaccgagcatgccggcattttgggcaacggcctgtgggcgcacttcattcgtcagtcgttccaagacaacggcattacacatatcggccaggatcgcctcgatgaggattccggcttccgtgtggtgttgacctccggttccccgaagaagaccttcatcgcctcctatggcgccgaagcgcacggtgacgccgatacgttcagcacactcgagccgcaggctaaggacgtggtgcatatcagcggcaatacgctgatggaccacacggccgcaggcgtagacgggttcctgctgaaagccggcgccgatccgaccaagcgcgattacacactggtcatcaaccccaccaatacgttgcgactggtcaacgaccatatgcttgaggatttggtgcttgcgcgcccagtctggtcctgcaatcgtcaggaggccatgaccttggccgaacgtttgggcgctccgatcgacgacagcaaggtgaccatcggcggcggtcttgacgatttcatgcatcagttgtgcgatggtctgggcgccacgttgcgcgcgccattggtggtgcgcgtcggcgctcgcggcgcctggatacgcgagccgggcggcgaaacgactcatatcgagggctaccccaccaaggccgtacacacccgttcggccggcggctgccataccggcgtgatgtgcgcgatgctggcgaagggccatgacttggccgaatcggtcaaaatcgcgaacgcagcggcttcaattgccattcagcacagcgtcaacggtgtgccgcagtgccctgattatgatgaggccattgcactgattggagaatagtatttctctggcccccctcagtcacctgcggctgaggggagtttttcgtacgggccttgcccagcattattcacgtaccgttcagctgaatgggccctctaccgctttgagcgctcctacgatagattgagttgaacactgcctaggagcgacatgaccaattccacgaatatccacaagcccaccggggccgagagccaatccaccgtgccgacaaacggcaagttgaccgcccgcgagaagaagtggatcgtctacgatgtcggcaactcggcattcgtgctgctctccactgcagtcatccccatctacgccaaatcactcatgccggcggatggcaacatcgtgtccgcgtggggctacgcgcagaccatcgcatcgctaatcatcgcgctgctcatgccgctgctcggctccatcgccgacgtgcaaggcatgaaaatcaagttcttcctcggtttcttcggcaccggcgtggtcacctgctgcgcgatggccctgcccctgacctggctgccgttcctcgtcgtctacattctggcgaccatcggcctcaacggctcgctcacgttctacgattcgatgcttatcgacaccacgtcaaacgagcgtatggacaaggtctcctcgcacggctacggctggggctacatcggttccaccgtgccgttcatcttctgcatcgcgctgatcttcggcggcccggcgctcttcggctggtccacggtagcctgcacgcgcgcctcgttcatcatcaccgccatctggtgggtggcattcactatcccgctgatcaccagctaccgccaagtgcattaccgtgccacccgcgaccagctgggctcggccgtgcgcggcacgttcagcgaactggcgggtaccttcggcaaaatcgtgaagaacaagccattatggatgttcatgatcgcgttcttcttctacatcgacgccgtgaacacggtaatctcgatgagcacgtcctacggcgccgagctcggcatcgactccacccagctggtggtggcgctgctggtcacgcagttcgtggccttcccctgcgcgattctgtacggccgactgtccggccggttcggcagcaagacgatgatcacggccgcagtcgtggcatacatgtgcatcgtgttctttgccgcgttctttctgaagtcggccgcggagttctggattctggcgattctggtcggcatgttccagggcggcatccaagcgctctcccgctcgtactatggcaagatcattcccaaggatcacgccaacgagtactacggcttctacgatatcttcggcaagaccgcctcaattatcggcactttcctggtggccaccaccacctccctgaccggcaacgcctcgctcggcgtgctttccatcgccgtcctgctcgtcgcggcgctggtcttcctgctgctgcagaaagacccgacgcgaaactaactaatttgcgacgcgcaatcagcgctcgcgataattcttgaacagttggatggcggtggcagcgattccgcacagcacgccgccgataggccatgcgacccaaaacatgcctgcaacggcggtcgaccaatcaccgcgcagagcagctgggctcaggaacagcaagcacaggccaatcagcgtggctatcatcatgatgatgccgcataccgcgccggtcagtttggcgtagaaatcctgctcgcccgcatgctccttgcggtcgccctcggccgctttgttgtatgcgttgatattgagcagactgtatctcatgccgcagtagacaaacccgaaaacaccgggcgcacagagcagcagaaaaactgcgttgggccagccatcggagacgccgagcatgtcatcggcatacaccgtcaccgcaatgccgatcagaatagccgagatgccaccgacgatgccgattaccagcagccgcaattctcggctgcggtcctccccggtgtagaaatcttctacgtatgggtgacgccgtttgaagtcaatacgcgacagacctcctggaatcagcatcgccagccccgcaatcacacccacgcagatgcacagaaacatcagaaaatcgttgagcggcgtcgctccgagaatggaattgctggaatcgaacaggttgccgatgccaaccccggcgataatcgcagcaacaccgccggcaatcagcagcgcgaatcggcggcgatgttcatcgtagccagtgatatcctgcgcaagctccgcgataggagcgattatgcccgccgttttggaagaagcggctaaaggcgatgccgcctcagccgaggagtcaacattcgacgaaccggccgcagaagccgacgcggcaggccgactcacatcgccaagtaccagatcatcaagcgtgcagccgaacaggtcgcagatcataagcagcttgtccatctcggggtaggccttttcggattcccatttcgaaatggcctgacgcgagacgccgagcaacatggccaatcgctcctgggtcaggttgcgttgcgcacgtaggtactgcaggttagcgcgaaaactcattggaatgtcccttcatacgtaatctttatcatgtcatgttcggccgatggccccactatggcatgccgtccatgtcaaccgccaccatctttgggttgcaatcgccggttattcgagcgcaaccacaagttgcatcggcggaattccgccattccgttgacctgagcagctttaacatcgcactccacgagaccgaagcttttccagctatgcgagggcagcttgtctcacctgccaccacgaatccgcctcgacccacgtacacatctgtgtacagcagcgctcgcaatcggttacctacgacccatatgatttgctgagcgaccgcaaaacacgcaatagccgagacaacaccggcagcgttaaagcttaaggcgactacttgcccaatagtccggaaatctggccgatgatgtcagcgggcagtcctgcttgttcggcaatggacccgaggtccagattgacaccctgctcctgaattgcgccagcaacctgactgatctggtcggcggagatgttttcctccgccatcgcctgcagctcgtcaagttggtcggcgttcaattggtcgccaacgacctgttggatttcacccaactgatcggcattgaaatgctcaccgattaccgccggcaaatcaccaatcgaaccgagattgaaatccccgccaagcacattgcctagattgtctgcggcaaaatttttcaggctatcgaacagtcccacatgtgccgctggtactgcttgttcagcaactgctgcagagcatcgcacagattctgcatcaatcgccgctcttcggcagacaagtcccgcgtcttacgcatcacagcccacgccatcagccgccgaaaaactggcattggtatcagctgaagccaccgcttccacgtgcgttgattctcaaccatgcccatcaattcgtcgcgagcctcttgacccataccccgagccagcgaacacgtattggacaaccagtccctcgatgcgttcgggatggagcttcgccacgatttgcgcgatcacgccacccagcgactgcccaaccagccacacatgctcatccaacccgtccagcaggctagcgacggcccgcgcaagctcggcgttcgtggtgaactgctcctgataatcaaacgtaatgaccgaataatgctcagcgaatcgctcgaaatgcagatagaacaggtcgggcagcccgatgccgcctggcaacagcacaaccgtagcgcgggcgacgggattgcgatagtaccgatatgagaattccgcgccgcccggcaattgcatggtttgttgcgaatatcgcgcgcagaacgaggcaagattactcattgccgatatccctttcgattgggggcctcacacaaaatcgcgtctctcactaattgcgtgagccaacatgactccgattgcgggagcgcaacaccggtagcgccactaatgcagacataggcgtccggcaaatgggccaaatgggcaaatgagcacaacaaaaaactcagcgtacgttcttccagacatcgccgaaaatagtccgggaaatcgtacgttgagggaccgaatgcccgaggggaagcaaaaacgttcgcagcatatagctagcgagcgcgaatctcaggtgggcgatgtaggaatcgaacctacgaccccttcggtgtgaacgaagtgcgctagccgctgcgccaatcgcccgaggcagtgatgaaaaaaccggcagtcacctgccggcaatccatcaagtgggcgatacaagattcgaacttgtgaccccttccgtgtcagggaagtgcgctaccactgcgccaaccgcccgggtcattctccagccgaatcaatcgcgattaattggcctttcgagagcggacaacgggactcgaacccgcggtctcaaccttggcaaggttgcgctttaccaactaagctatgtccgcattcgtcacccttacaggcaacagatgttaaagatacgcgctccgttggagaaatgcacctgccctgcgtgtcccgcgggttttcgggctttgcggccaatcaccgagtccgcccatgaacgcagttcgccgtagccgcatacagcagccatgcggcgggcatggccagcatgaacaacggatagaaccattggatcggtgcattgccgtacagcagtccgccaacaatcggccccaatgacatgcccaaatcgatgccggcgtaatacgtgctgttggcgatgccgctgcacgcaaacaagtggccaaatgcgacgttggccacgatttactgagtaatgagcgtgttccacgcccgcagccaccgattcttcgcttaaggcgaagtggttgtcagcgcggcaactgcacaatgagagcgttaccaacaaccaatgcaaacccgccggcagccgtagccgccgcccgcaaggccgtggttgaggccgacggcgtgtggatcttctcccccgaatacaactacagctacccgggcgtgctcaagaacctgctcgactggctgtcccgcccgctggagccgttcccggccgagtccgcttccgtgatggtcggcaagaaggtcgccctgtcctctgccgccggtcagtccgccggcgccggcacgctcgccaagctcaacgaggtgctgggctttggcaagaccgaactgctgcccaccgacaagcaggtcggagtggctctggctcccgaggcttgggggcaccggcaagctcaccctgtccgatgaagacgaggcgcgtctggctgccgaggctgacgccttcctcgcgctcgttgcagagtagttcatactcgcaatagccgagcccaataatctttcagaacgtaaaaatccctccggttcctctgaccggagggatttcttatacgtcatcgattacgcatagattcaatggcggcaatgtcaccgccgccaagggttagctcatgcgataatcaataccctccgagacagtgacgcccaatcacgacgtgaaattgcgagtttttctttagcgagaggcatctcagcctgatcaagcgactggacacatgcccatcttcgttcaaagaggtacatttgagactttgcagaaagctatctgccttcaaaggggtattgaaactctgatatcgcaagtatgagcgttgatattccaacgaagatactcgcggtctcgcagtctaggtactcctttgaaagcagatgacattctgcaacttctttggaaagctgatttagaggtctgaaaatatctatctccatttcgagaggcggatgcgaaccgttccgaaggtctaattccatttcgaggggctgatttgaaccgtcccgaaggtctatctccgtttcaaggggctgatcatcctatgcaccacgagtatcaatggcataacgtcaacgccattccgccgtttttgcgtcttgtctacttgggcaacaaccccttgaaacggaagtagacttccggcgaatgtcaaatccgccccttgaagtgcgagaagcccctccttcacggaggggcttctcgcactttgttaatttttttctcactgaggctgtgtcagtgagaaaaatatgcgaggcagctcccctcaaccgagggaagctaggggatatcaagcctcgtagtagccgtcggcaccgagacgggcgtccgggttgaggagcatggccttttcgacctcgtggtggtcgtagccgcggtgatcctcgtggaagcgacggttgtcaatcggctcgtagagcgcggcgcgacccatcatgccttcctcgaggtgacgctggcctgcagccaagcgcgcgttggcacgctcacgccaggcttccagcgcggcctcgccatcggccttggccacggcggcctcgaaggcaccagggtgaaccagcgccacgaagccggagacgtgtccgaagccgagcgaggtggccagaccggccttgaccgggcgaccagcggtctcacgaccgaactcgtcctcgccgccgccgatgcgcaggggctttctgacccagaccatgtggtcgtcgcgctggagtttcggatccacgcagtcgagcgacacgttcgccggaatcacgccggacttgaacagctgcgtcaggccgttgacctggaagatgcaggcaccgcccttggcgtggccggtgagcgtcttctgggagatcacgaacagcgggttgccgtcggtgcggccgatggcgtgggccagcgtgttgtgcagctcggactcgttcgggtcgttggcgttggtggacgtgtcgtgcttggagaccacggcgatatcgtcggctgagacgccgagcttagccaggtcgtgcacgagcttggagtccttgccaccgaggccggcagccagggcaccgaggcccggagccggaatcgaggtgtgggcaccatccgcgtaagagtggatgaagccgaccacggcagcgaccggcaggccgagcttctcggcgatgtcaccgcgggtcacaaggatcgtgccgccaccctgggattccaggaagccgccacggcgacggtcgttcgcacggctgaagaagcgcgcgtcgatgcccttgccgtacatttcctccgagttggcggtggcgttcatgttgccgaagccgatcacggattccacgccgatgtcgtcgattgcaccggtgaccacgaagtcggccttgccgagggcgatcttgtcgacgccctcttcaagggagacggccgcggtggcgcaggcggagacgggctggatcatgttgccatagccgccgatgtaggactgcatcacgtgagccgcgaccacattcggcagggcctcctgcaggatgtcggtcggaatctcgtgattgaggaagcggtcgaggtacagcttgcgcatcgacatcatgccgccgaagccggtgccctgggtcgaagccaccagcgaggggtggatggactcgaggatttcggcaggggtgaagccggcgcccagataggcgtccacggtggtgacgatgttccacagggcgatcttgtcgacatcgccgaccatcgaagcggggatgccccaacgggtcgggtcgaagcccttcgggaactggccgccgaccgtgcgggtcatggtggcgcggcgcggcacgcggatcatcgagccggcgtggcgggtcacgttccattcgccggattcctcatccggggcgatggtggtgtgcgcttcgtccagcttgacgtattcggcggcgacatcgcgggtcggcacggagaaggtgacgtcgtggtccaggaagacctcggcttcttcttcgtcggcgccgtccttgtagtcgtcgcccatgccctcctcgaacggacggataccggagcgagccacgacctcatcgtggtagcgctcggcgatgtcctcttcgggcaccaggttgccgtcggtgtcgtaccagccgggcttcgggctgtcggcccaagtcagcaggcccatgttccatgcaagttcgagcactgcgccggcgctcaggtcgacggtgccgtccgagtggatgccgagctcggcctgggcgcgcgtacgaccggaaccccacgggcccagctcaccgacggagacgatgacgatttcgtcctccgggcgggcggtgacgttctgccaatcggcaaggtcgaccggggcctgcttggtgacaatcggggtgggcaaagccttgagagtggagcctgcggcgccgccctccggcttctctccctcaatcgcagccttctcagaggaagcttccttctccgcatcggccatggcctccgcgcgcaacgccttgatgtcgatgggctcggagccgaggccaccggtcagatccacgtcgagcggagccttgagggcctgctcgcgcgattcggcggtgcacaggtcgagcagtttggccgcgatctgcgcggtggagtaggtgtgaatgccgtggcgctcgacgacggcgaccagcgggtcgttgccgcccataagaccggtgccacgcacccagccaatcttcgggtgagcgaaggtgacgcggctcgaccacaccttttcggcgcggacgcggttgacgatggcgtcgaaggcgctcttgacctcgccgtaggcaccgtcgccgccgaacacgccgcggttcggggaaccgggcagcaccacatgcagcttgtgctgcacgttggtgtcggcaccgatgtggctgaagccggcgatggcgcgttccacgccccacagcatcagtcgggcctgcgactcgaacaggtcgccggagtcggcaagcgtgccgtgaaccggcggtgcggcgaacgggaagaacagggtcggctcccacgcgggcttcaagatcgtggtggtggcaccagaggtcttcttctgctcgtggcccacccagtcgaccagcgcgtcaacgtcgcgatagctggagaggttggccggaaccagccacagcttggcgttgccggtggcgtgctcgcggtacgcctgcttcgcccaagccttgatggacggcttgaagctgtgtgaggtggccaccacagtggcgccgcctgcaagcaggccttcgaccacctgagcggcgatggagttcgggctcacaccggtgacaatggcgatgtcgttcgcgtagcgggaggcgttcttgtcggaagtaacggattcgagggcttcggaagcggccttctggaaggcggccttgagcccatcgttgttcgacttgtcggcgaaccattgggcttcggcggcgatggtcttgccaaggccaatgaagctgccgttcagagcggcggggtcgttgtcgtagtaggcgcgggcgaggtcttcgcgggcggaggcccaacggtcatcgaagaggatggccttgttggcatcaaagcgtggagcgacctgcttgggccagtcggagccgagctcggcttcgaccgcggccaccacggcggcattctcgtcctcggattcctccggagccggagcggccacgccgagctcgttcagcacgaagcgggcggtggcggcaagcacgccgttggaaccggtgaccttctcggcgaaggcgtcgagtgcggcggaatcgaccacggcaccgccagcggcaccaccggcggacggcagagccacggcaacgcccttaagctgggcgaccacttcaacagcggcgtcgatcagcttgtcggcttccggcttgttctgcacggcagcggtcggcagcttggccaggtcaccgccacgggagctggagccctcgcgggtatcgagcagcagtgcggcaagcacgctggccacccagccttcgccgagctgccacacgttggacacacggtcgcggatgtactgctgcttgacgccggcggcaccgaacagcgagcgcagacgatcgcgcagtgcctcggagagcacggcaccgaacggcttgtagttcggggcggccttgttgacgatctgggcgagcttgtcgagcgtcgcctcggcggcaccgtccacgctggccacgcccagctcggagctgatgtccatgagcagctggttacggcgagaggaaacgccgttggtcaaggtatcggtggtgtcgttgctgccgatctggtcaagacgaaccttggcggcgtatgccatgaggacgccgatgccatcggaggctttgaagggcaggtcggcgacggcggcaccggacggggcgccggcgggagcggcagaaaccggagcggccggtgcgggagcagcggcagcagccggcgctgcgtcagcggctgcgctcgaaccaagcttggcgacggcggaaccgccggcgggagcggtttcgaccggagccgcagtctcttccggctcgtcgtcaggaaccagcgaatcggtgtcggtcatgtagacgcggccctcatcgcggccgacgttgtagaccaccgtgttgttgccggcgaactcgggcagacgcagggtcttggcaccgaggttggcgagcgtcggggcgttgccgagaccgacttcgacgtactcttcgacgccgaggccgccctgttcacgcttgccgaacagcagtgcctgggtttcgatccaacgcaccggggaggcgaattgccaggagagcaactcagtgagcagcagtcggccgagcttctggtcatcggcggcgtaggaatcccacacggccgggtcgtccagtgcggccttgatacgctcggaaggcacgacttcgaggatcttggcggcgaattcctttgtcatctcgaacggcgaagccacgaggttcggaatgtagcggtccaccagacggccacggtagtcgatgtaagcgggcaacagcgcgtcgagcttgtcgcggaattccggcacgcccttgcgcagcaaggtggagtggaacggcacatcaatgccgggcaccagcatgaacgcgggtttgccgccgaatgcggccacgcgacgggcggaatcagccttcagcgccttgagaccggcgatcgtgccagcgatggcgtactgctggccggcgaggttgtagttcacgatctccaggaactcgccagaggcattggccacggattccacgtattccttgacgtgagcgtcgtccacaccgaactggttcgggcgcagggcacccatgcggtagttggagcggccctgggcgtcacgctcgatgaggtggtgcatggtggaaccacggtggaacacgagctccagtacggtttccagcggaatcacgtcggcgaatgcggacagtgcgttgtactcgccgagcgagtggccggcgaagtaggcgggccagatgtcggcgccggcttcgcgcaggcgcgcggtctgggcaaaagcaaccgtcgcgagcgccacctgcgtgaactgcgtcaggttgagcaggccttcggggtgacggtaggtcacgccgttggcggtgagctccttcgggttatcgcgcacgaggcccaggatcgagaagccgagcttggcgcgggtgagcttgtcggcgcgctcccacacgtcgcgggcggcggcggatttggcgcgctcgtccagaaccatgccctgcttctgaatgccctggccggggtagacgaaggcggcgcgaggcgcgcggaccagtgcggtgccgcgggagacgagctggccgtcgatgcggcaggtgacctcgagggtcatgccgccgtggcgcaccttgccgacgcgctcgacggagatctcgacggtgtcgtcgagctggaccatgccgtacatgttgtaggtccagccggcgatctcgtagtgggtgcccttctcatcggtcgcctgcacggcgtgctgggcggtggcggacagccacatgccgtgcacgagcggggccggcaaaccagagatgcgagcaccgcgagtggaggtgtggatcgggttgaagtcaccagaagtgcgagcgaaggcggtcatgtcgtgcggagcgacaaccttcacgcggcgcagcagacggcgtggtgtaggcgcgatttccttgtgctcggcatcaccgaactcgggggcgtcggccggcaaagcatcggagtagacgcggccgcggatcgcgaaacgctcggtttcgcgggcaagcagcgtgccgtcggcagcggtgtgggtcacgtggatggtaaccacgcggccggaggcggactcgaagtaatcctcagcccaagacttcaaggcgatggtttcgccggtgtgcttgagcaggtcttcctcgttcacctcaagttcgatgaggtggtcaaggtggacggcgttgagcaggccttcgataaccgggtagcccttgacgtacacggagccgagcgccgtgtagatcgcgggccaggccgggccgaccagcgcatcaggagcgatgcggctgggctgcaatgtggcaggcagagcggcaccggtggccgcctcatggtcaaagccgaggttggcggagagggtgtaggcggcggtggccgtggcaaacggacgctcggcggaaaccttgccgtcgagctgcggcatcgcggtgagcttgtcgccggtgatggcggtattgccaatgccggcggtggcggcgagcattgcgtacacgtccggaatcagacgctcgcgatccacgaccggcactcggccaggctcggttccttccacgatgagcggaatgacgatgtcacgaacggcgtgcttggaggtgccgccgtccggatcgttgtcccagtaggtgtcgaggtggatatccagatcgtacttgccggccgcggcgtcgaacgcgcggatttcgtagtactgatcgcccagagcggtgccgtaggcggggttatcggtgatgtggccgacccaggagatgttcggggacttgcggatgaagtcctcggcagaaacggcctcgccgagagcagcgaagtcattgctttcagaggcattctgctcggccttcacgcgctcgatggccgcgttctcgaaacgaccgaggatatcggcgatcggctcgtccacggtggtgatgccggccacagagatcgggccggggatggcacgcacggaatcggcggagtaacgctggtcttcggactgccagagctggtcctgcccccaccaacgcagcagatcgttgtcgatgaccggcacgaacggcatgggcttggggtattcgcgcacgagcaccgggaaccaggccacgtcggccgggaccaccttgagttcggcggtctgcgggtaggccagagcgagcttttccagcgcgggggccggatcggcgagaatgccgtcgcgggtcagcaggccggcggcagcggcctcatcggcagaaacgccgtcggcggcgaacagcttggaggtgaactcgccggagtcggtgtcgttcgcacgggcttcgatgcgctgcagcaggtgctggaatcggtcggcgtaagtcgggtcggcccacgggaaggcgagttcggcgaagcgctgcgcccactcgaggtaggtcatggaggccagatcgccgaagtagggcttggcggtcttgttcagggcctcgatgatttccttgcggcgggagtcgagctcctcggggtgcttcatcacgcgcacaagcaggcggccgcattcggcggaatcgttctcaagctcgtagatgtcggcatgcaggtggctcaggcctgaggacatgccaccgaccgacttgccggaaggcacccagtgggcggcctgcggggcgaacacatcatcggacttggcgtcggccggaatgccgggcgtcttgacgagcatctgcttgacttcggggctggtgtgggcttccttggcggtcatcgcagcggtgccgataagcacgccgtcgaccggcatgtccggcagaccgtaggcgtgggcccactggccggagatgtagtcggccgcgcgttcgggggtgccgatgccgccgccggcgaccagcacaaggttgtcgcaggcgcgcacttcggcgtaggtggcggcgagcaggtcatccagggcttcccagctgtggtggccgccggcctcgccgccttcgacctgaatcatgatggtggtgggggccacggccctggcgatgcgcacgacctgacgaatctggtcgacggtgccgggcttgaagctcacgtacggcagaccatcggcctgcaggttcttgatgagttccacggcctcgtccagctcggggataccggcggaaacgaccacgccgtcaatcggagcgccagaagcacgcttcttgggcacgatgcgggaggagccgaactgcaggttccacaggtagcggtccatgaacatcgcgttgaattcaaccgtgcggccttcctcaagctcgtcttcgagggcggcgatgtggcggtcgaacacttcggcggtcacctggccgccgccggcgagctcggcccagtagccggcgttggcggctgcggccacgatttccggctccacggtggtgggggtcatgccgggcagcagcactggcggcttgccggtgagcttggagaacttggtgaccagcttggcgccggccggggtttcgatgacgcgcggcgcgagtgccttccagttctgggtgcgctcgggctcgctttccaaggtggagagagcggagcgttcggacagcgtggtggcttcgaccacgccgatgccggtgccctgcaccacgttgccgatcagcttgccaagcgtgttgccagggccgaggtccacaatccacagcttggccgggtcggcggcgttgaacagcgccttgacgcgggcattccagtccacatggttgagcagcacttcctcagcgagtgcgcgggtgcgatcctggtcaaagccgcaggcgccagcccaagacacggtctgctcaacagcttcggccatgagcggagaatggaagggcagggtgacttcgaggtattcgagagtggggttgaacacagtgccgccgtggagcttctgttcacgcagcttggcctggtgcttgtgctcgcgctcggcttcgagggcgagtgctgccaggtcttccgggtagccggaaagcacgtggtggttgtcggagttggtgacggcgatggagatcgggcctcgggcgttgttcacgcgcttgaccagagcctcaacctgttcgcgggtggcgcccttgacggagagcatcgggctggcctcgccgtacttggggttcaggcccagttcgcgcacgcggcgagtgccggctgcaccgatcagggcggcgacggccagaatctcgtcgagggtcttgccggcggcttcgatggagccggcggcctcgatggcacgggtcatgtgcacggcgagcacgccctgggagtggccgagcacggcaaccggcttggcggcggccacactgtagccaaggtgttccaagtcgagcagggcgccgagctgggtcagggccacgccttccacggatgcggtggcgtcggctgcagcgctgaggcgggccgggttcggggtgaagccgaacaggtcgaccggacgaccggtggtggccagcaggtcagcggcggccggggcgagcagtcggttggctgcggcgacgtggccacgcagggcctcgtcaagactgggatcggtggtctggtctgccaaggcgaccggccacggggtggactggccggcgaaagcgagcgcatgaggctcggtggtcaggcggttgaggaagaaggtggacattactttccttacttgtgttttggttgacgtcttcaaaaatcaaagtggctggttgccgtggtgtttggtggtgcgcttgatgcggcgcttggtagcaagcgtggccagcgattcgacaatcacttcacgggtttgttcggggtcgatcatgccgtcgatctgcccgatttccagcgagaggttcgcgttgacggtgctggtctcgtactccttgatgtacttggcccgcagcgcatcgacgtcctgtccggaggctttggccttggccaggtcatggcggtggatgatgttcaccgcgccggccgcaccgagcaccgcgatctgggaggagggccacgcgaagttcaggtccgcgccgatggccttggatcccatcacgatgtacgcgccgccgaacgccttgcgcagcaccacggtcaccatcggcacttgcgcgttggcgtaggcgtagatcaccttggcgccgcggcggatgatgccggcgtgctcctggtcggagccgggcttgtagccgggcacgtccacgagggtgaccacgggcaggttgaaggcgtcgcacagtcgcacgaatcgggcgaccttctcggacgagtcgacgtccaggatgccggcgagcacgttcggctggttcgccacgatgccgaccggcttgccgtcgatgcaggcgaagccgacgagcgcggaggcgccgaacagttcctgcacctgcacgaattcgccgtagtcgacgatgcagcggatcacttcgagcatgtcgtagggctgccgttcgttggcgggcacgatggtggcgagtcgcttggcggtttcgcgttcggcgcgggcggcggcgtaggcgtagaccggcggcttgctttcgctgttggacggcaggtaggcgagcacggtgcgcgcgtagtcgatggcgtccgattcgtcctcgccgaggtagtgggccacgccggacacccggttatgcacttcgccgccgccgaggtcggccatggagatggtctcgccggtcgaggccttgaccacgtccggtccggtgacgaacatgttcgagttctcgcgggtcatgatgatgaggtccgtcagtgccgggcaatagacggcgccaccggcgcaggggccgaggatcaggctcagctggggcacgaagccgctggcctcgcaggtcttgcggaagatgcggccgtactgggtcagggcggccacgccttcctggatgcgggcgccgcccgaatccacgatggccacgatcggcactttgaggtcgatggccatgtccatcagtcggcagatcttctcgccttcggcggtgccgagggtaccgcccttgacggagaagtcctgggcgtagacggcgactttgcggccgtagacctggccgaagccggtgatgacggccgcaccggcgttgccgccggcgatgttgccgccctggaagcggccgatctcctcaaacgtgccagtgtcgaagagcaggtcaaggcgttcgcgcgcggttttcttgcctttggcgtgctgtttgtcgcgggcgcgctcttcggcggcgcgagccagttcggcggccttgactacggcggcgcgcagcggctggtgagccggaggctgggaggcgttggccgccgaggcagcagtcacggccttgacggccggcgaatccataatgtcagtcattgccgccctccttcttggagtcctcggccttgaccacatccagcgtgaccaacgtgtcgccggcttccacaccatcggctggaccgacgaagatcttcttcacttcgcctgcggccggcgcgtacacgtagttctccatcttcatggattcgagcaccaccagcaggtcgcccttggccacctgctgaccttcggacacgttgatgcgcgtgaccacggcctgcatcggggacgcgatgacgccggatttggcgccatcgttcgccttggcggcgccggaggccacattgtgcaggcctgcgccgcgcaacggctgagtgggtcgcttggcaccgcgggcgcgggccgatccggtgatgttctccacgatgtcgagcggcacggtgagcttgacgcggcggttgttcatctcgatgacaaaggtctcggacgtggacttgtcgggcgcggcaggagctgcggcaccagccagcgatgccggctgacccgagctggcggaagccggtgtgcggttcaggtacgtgcgttccagccacttggtggacacggagaacgggtgaccgttctcggcggtgaagtcgtcgttgcggaagatctccttgaacagcggaatcggcgtgggcacaccttcgatcaccagctcgtccagcacacggcgcacacgggccacggcgtcaaggcggttctgggcggtgacgatgaccttgcccatcatcgagtcgaacttcggggagatggtgtcaccctgctccacaccggtgtcgatgcgcacaccgggtccggccggccactgaatcttctcgagggtgccggaaccaggggtcaggttggtggccgggtcttcgctggtgatacgcagttcgaagctgtggccgcgcggctcaggggtacgggtgagttcaccgcccgctgcaatgttgagctgttcgcgcaccaggtcaaggccgctgacctcttcggacacggtgtgttccacctgcagacgcgggttgacttccaggaaatacaccttgccattcggggtcaccatgaattcgcaggtgcccaagcccacatagccgaccgtggtaaacaggcggcgggagtactcctccaaagtgctgacgatgccctcgggcaggaaaggcgcgggggcttcttccacaagcttttggttgcggcgctgcagcgagcagtcacgggtggagtacacggtgaagttgccgtgcgagtcgcgtccggactgggtctcgacgtggcgtgccttgtccacgaacttctcgatgaagtattccttcagatcgccgccttgcagcgcgtcgtggttcatgtagaagcggcgcagttcctcgtcgtcatgcaccacggtgatgccgtggccgccaccgccatcggtgcgcttcatcatgatcgggtagccgtgggtgtgtgcgaagtcgagcagggtacgcacatcggtcaccggttcggacagacctggcacgggcggtaccttggcacgcagggccacgcggcgggcggtgatcttatcgccgagatccacgagcgcggtgtggtgcgggcccacccaaatggcaccggcatcctcgaccttttgcgcaaagctcggcacttcagacaggaatccatagccggggtgcacggcgtccgcaccggttttgtgcaggatgtcgatcagcagattctcgttgaggtaggtgtccttgtaggtgtcgccggaaagcaggtatgcttcgtcggccatgtccacatagcggctgttgcgatcctgttcggagtagacagccacggtggagatacccatctccttggccgtgcgcactacgcgaagcgcaatctcgcctcggttcgcaatcagcagttttttgacagtatgagccataacgtcaaattgtgcccttgatatgaggtatggggcaagctgagttcgcacaaaacatatcatcggcttttgtaggccatgaacaaacgagtgcgtaagtttcaggagcgtaactgcatgctcacgcaccccttaagacttggaacatcagggtttttggcgctattgaccaagcacgccggaagttgacgccattcatgtattcgtcaacttgcaacaaaccagaatcggaaaatttgtgggttatcacgaaatcgcacgaaaccgaacactcctacgatggcaaccgtaagttcgggggaaggctcaacgtacaggcggatacagccaatgaatcggcactcgattcaggcatcaaccgcctcgttccgcagtcgatggtacgcatgccaagccgtccgcaatatgaacggctaatgcgcatcaaggccacataaggccacggcactcccactccatcgcataccgcctgccggcaacggcgatagcacacaacataggagttattcatcatgcagacttcacacaccacctcatccgctgcggccaccgcatcactcggccgccgcatcgtcgccgcttcgtggaagccggcgctgttcgccgtactgatgtggctgtccgcagccgcaggcgcaatcccgattccgggcacaccggtgccgatcaccctacagactttcgtggtgatgcttgctggtctgatgctgccgtggcgtcaggcgggttccgccgtcgccgcttacctggcagctggtgcagtcggtctcccggtgttcgcgggcggcgcttccaccatggctctggtcggcccgagcgccggcttcctcttcggattcctgcctggcgtgattgttatcgcgctgctgcgcggtaaggccaacacctcgtccgcttccgccgccgctctcaccgcaggccgctacctgctggccgctctggttggcggcgtcgtggtggtgtacgcctttggcttcgtcattcagtccgcgctgaccggcgtaccgatcgccgccgtggccttggcgtccatgggcttcgtcgccggcgacaccatcaaggcagtcgtcgcctccttggccgcagccggtctgtccaagctcggtcgctgacctacagcactcctacatcggcggtgcggaccgtatggtccgtgccgtcttctgtttttaagatcaatgaggcatcttcattaagcccgattgcctcaccaatcagcgtggtgccatcggtgaagtgcgcctcgacctgacggccgcgcgcccaacataccgccttcatctcttcacgcaatgcctcggcctgcccgtgcggatccgcaatgaacgctgccaggcgctctcggaagccctcaacctcacgttcggccaccgcgtcacgcatctcgttgaacgacggcaaccccgaaacgtgcagctgcagcgaagtcgattgcgacgtcggcaaacggctcgcgcccaacgccagattcaggccgaccccgaagacgacgacaacatcatcatcagcttccccgtccggcaacaacaccagttcagagagcagtccgccgagcttgagcccgtggcagaacacgtcgtttggccatttgagctccaaaaaacaatcctgcttattcggagcggcgccatattccttaatcatgccgttcagcgcatcgagcgtgaccaggcccgcaatcatctgcagccagccgttgacggattcgtcggtggcgatcgcgcgaggaatgcgcacggcataggacatcgttgagcaacggccaggctgactgatccaggtatgaccattacgccctcgtccggcgctctgccaatcggtggcgactacaccgacggcaagcgtgccgcccttgcgctcaggcagcgtcaacgacccgtcacctatcatgcgcgcagccaacgcgttagtcgaatcagtctcgtccacggcgactacttgatctgcaacggctttggttctcggtagctgcggcgttgcagcttgcaaagcaatcatcatgggaactacgttaccccgatttgcgcgaccagattcccgatgtctcgcgaaaaagcgcacaaaaccgcccattttcggccaatacctcggtgtgaacgctcacacgtgagcaaagtcacaccatgcagatggcccgcatacgattgcagtcatagcggccttgcctgcgtctgcaatccaccggtgagacggcgaccatcacacatctgcatccgttgacctgtgcggctaccatagactgtcatgacgtcaccagcctcttcactgcctgctgccgcagcccacccgcgccttgcccgtgtgggcgctgctgcacggtggacgctggccgtactggcttgcctgtggctggcactatgcacagcggtgggaccgttgtactgggattttgaaaacggcaccatcgccaattggaattggaccaataccgtattctttgtgctgtcgtttgccatctaccttgggctcatcgtgattatggtgcgctttgcggcaggacagcgcgtgctgccacgggcgatcagcgggagactcagccgggccgggcagcagcacagcaatcaggctctcgaaccatcgcagtcccagtccgtcgtcgccgactccaatgtctccaagcgtcacgccaccgttgcgtcccgcttcgccaccttgggccgttggatcacccgaggcacgaatcggttctggaagctcgcactcgtgttctttatcggttggctgtgggtgccgaccaccctgctggccgcattcggcgcggatatccgctcgcaaatccgcgaattcagctgggcctggaaccaatggaccggcctgcaacagccgtatatcggcttcttctccttcgtgccaatggacatctaccccaccgcgcactatatgtggccgcctgaccccacttatctgaccgaccagcataacgtagtgctcaccgtgttctacggtgcggtggccgcattctcgcgatatctgaccggctcgaacgatgcaggcatcgtggcgcttgccgctggacagatgctgctcgccgtattctgctgcgccgcaaccgccaaccgattcctcaatcgaccgtggatgggcgtggctcagtcaaccaaggacaagaacggctccagcaccagcaccggcaacgtatcctcgactaccagcgcgcgcatcgcacaggatgccgcaccccagcttgccggggggcgtgcccgattcctgattcttgtgttcttcctgtgctgcccgctggccgtgttcgccacgatctccatcaccaaatcgccactgttcgccttctcgttcgtctggtggttcggcatctggtatgagctcacccagacatggaagcccgcgggaaagcgcaaaggtctgactgctaccgcacccatccgcttaccacgtcatagttttgttgcgttcgttctttccactgcagtgatgctgatttccgcgaagtacgcctggtacatcatcgccctacagatcgtgttggcgctcatcgccgaccgccgtcgttggacaacctacgtcgtggctctgcttatccccaccatgctgattcatggcggcatctctcttgcaatctcctccggggcgattatcggcggcgaccccatcgaaagccgcggcgtgcagttgcaaatgatcgcccgtgtggccagccgcaatccagaaggcatctcggaggaagccaagaagaatctctctgacgtgttcaatctggaccaaatggccgacgcctattcccagcaagatgctgacccggtgaaatcctcgggtattcaagccaagaaagtcagctacaagtggcgcacggtgacgcccgaggacatgaccaatttcaataaggcatggttcgaaatcgtcaaggacaatccggttatcgcactggatgcattgctggccaagtgtttcggctacttcaatgtgaccgaccagccatacgtgtcgatggactactacgtgaccagcgactacgtgcagaagaactccacatggattaagagctacaaccacaactggcgcgagcgaattactggattcacccggagctggggcaagatcccggtgatcggctggattacgcacggcaatttctatgtggtgatgacgctgctgatcggtgccgccgaagtgattcgccgccgctggctcacactgatgacccatattccactactgttgcttatgggcgtgatgattaccgcaccggccaacaactttgaacggcacatgcttccggtggcgttcgtgttcggtttcgtggtgctcacctattggcgtgaatccttggccgaacgtcggattgctcggcaggcacaatcttcagcatcgacgacaatgaccctgccgcaatagttgcgtaaaacgattgacaatgtgatgccggcagaatcgttgtccagtgccggtaccgccaacgctagactggtacatatgtcagattttctcgaactacttgccgccgacgccgccaattcgtctgatttcacagaccgttccggcatctctgcgaccgaccgtgcacgcactgtgctgttcgagtgcctgttcaatcatctggccgacgaccgcgtggcctcgctcttcaccatccttggcttcgagcatgattttacctgctacgccattgccggctaccccgctcgctccgccgcccgcagccgtgttgacattgaaaaaatcgtggccgattttggcggaacatgtctgactgccgaacatccgataaccggactcacaggtgctgacaatggtacgggccgtaccgctgttgtggccctgattcgtccggtcggtgcggccacaccggaaatcatctgtaacaccatcgccccggctttcgacgccgaccgtcctatcgccttgggaccgcaacgtaccggcgccgaaggcgccatgcgatccgttcaggccacgctgtactgtctgaaagccgctccggccttggctgccaccgcgcagtccctcccccgcccgctgcgcaccgatgacgcgctgccagaacgcgcgctgattggcgacgaagatgctcgcgatgagctgatccgtgtggtgtacggtagcctaaccgctgcaggaccggatgaccctacattgctgaccgtctcgacgttcctgaaatacgggggatcactggagacctgtgccaaggaactcaatgtgcaccccaacaccatccggtaccgtctcaagcgtgcagcggaatccaccggctgggacgccaccgacccgcgtgaggcgtacgtgcttattacggccatcgctctagggcgtatgaccacagcgcagtaaatcgttttttcgtgctccccactggcatgcgctgaatcgtatcccataccaattcagcctatgacgcgacaagcctcatcagacaaggcagacgaaggccactgcggctattgcagggcgttgtctcgtacagtaggactgagccgccccagacggctgttgccgacatgcagcgtgaaatcacccaacccaacaaccaacctgcatatagcaaaaggcggctcccaccacagtgggaaccgccttgattagctactcggagctaagcccgatcaggccaaggtgttcgggtcaaccgggacgcccgggttcatcgtggaggtgatggtcgccttggtcaggtaacggcccttcacggtggacggcttcagacgcttgacttcgtcggccacagccttgaagttctcgtccagagcggactcatcgaagctcatcttgccgatgaggaagctcaggttgccgttcttgtcgacacggaactcgatcttgccgcccttgatgtccttgacagctttggtgacatccatggtcacggtgccggtcttggggttcggcatcaggccacgcggaccgagcacacggcccagacggccgaccttgcccatcatgtccggagtagcaaccacggcgtcgaagtcgaggaagccgccctgaacctttgcgatcaggtcgtcatcaccgacgatgtcggcgccagcctcggtggcctcggtggccttcgggccacgagcgaacacgaggaccttggcggtcttaccagtgccgtgaggcaggttgacggtaccacgcacgagctggtcggccttacgcgggtcaacgctcagacggaacacagcctcgacggtctggtcgaagttgtaggaaggcatgctcttgagcagagcaatggcctcgttggcggtgtagaggttgttgcgatcgacgcgctcagcggcttcgcggtacttcttggaacgctttaccatctgtccttctccttatcagtccgtaaccgtgatgcccatcgagcgagcagtgccctcgatgatcttcatgccggcctcgatatcgcgagcagacagatcttccatcttggtctcagcgatttcgcgaacctgcgccttggtgacagagccgaccttgtgggtcagcgggttctcggtacccttctcaatgccagcagccttcttcagcagagctgcagccggcggggtcttgagcacgaaggtgaaggaacgatcttcgtaaacggtgatctcgacagggatgacctgacccatcttgtcctgcgtctgggcattgtacgccttgcagaagtccatgatgttcacgccatgggaacccagagccgggcccagcggcggggccgggttggccttgccagcctggatctggagcttgatcagcgccgagactttcttcttgggagccataatatggttcttctttctataacgcggttcaaatggtcgccgtccgtgtccatctactcagcccaatcggtcttgactcattaggtatccgattgtgctcaatatttggccgcggtcggtctcctcccgcaacttatattgctgtgctgtgctagcgggtcttccctccagacacaagctttcccattatgtcgtctcacccggacaacaactggccataagtccgccccggttctcgccatcggcagcatcatccatagttgttctcatcatcggactgcgtcatccacaatcgccacccacctaacgacatcaatgcaccgccccagcgtcagaaatttaggaaaagagcggcttcgtcctaaaattctgtcactgagtcaaagccaatgacagatatttaggaaaccaaccccaatctcctaaaattctgttactaagactcacttagcgacagcaatttaggacgactgggataatctcctaaaatcctgtctctaacgaacaagggatgccctagggactacaaagttaccggttacggctgcaattacggtttgcggctacggtcacgatgcgacgagatgcccgatgactaacaacaacaaaaagcccgaccgtgatggtcgggcttttgctattaaacctattagtcgagcttctgcacctggtggaagccgagctccacaggcgtatcgcgaccgaagatggacacgagcacggtgagcttctgggtggtgggttccacgtcggaaacgacagcggccatggtggcgaaaggaccatcggtaacggtgacctggtcacccacggcataggagacctcgaccttgcgcttcttggcggcagcgggcttgtcgccggcggccttgagcgcttcggaggcaatcatcggggccatcatggccacgacttcctgacgggagagcggagccggatccttggacggaccaacgaagccggtcacgccttcggtctcacgcacgacacggcgagcgttctcgtccggccacatacgaatcagcacgtagccaggaacacgcacgcgggtgatgaccttcttgcccttttcggtgtgcttctcgacctcttccatcggcacctcgacctggaagatctgatcttccatgccgaaagaagccacacgggactcgatgttggtcttcacccgcttttcgtagccggagtaggtgtgcagcacgtaccacttgccatcaagggtgcgcaacgacttggagaactcatcgacggccttctggccggcatcggtttcctcagcctgctcggactcgttgacttcggactcttcttccgccgactcacccacagtttcaggggaagccacaggagcttcggcaacaggttcggcagactcaacggcctcggccggagcatcagccacaggagcctcatcggccgccgcatccacattctccagagcagcgtcgaggttctcgagattcagttcatcactcatgcgttgtcattcaccttcaggttatgcgtaaatcagccgaaaatacccagcgtggccttgcccagaccgaagtccatgccggtaacgagagccatcagcagcagcacgaagatgaacaccgccagagaccagaagaacagttccttggcagtgggggttacgaccttgcgaagctcatcgatgatctgcttgataaacagaccaatacgcatgaagacattcggcttgactgccttttcgtttgtgctcgtcttagccattccgtacctcgcatcagctgcttgattattgaagaaacttggcagggaaggcgggactcgaacccacaacctacggttttggagaccgttgcgctaccaattgcgccacttccctaggtgaagttcacctcggctggcgttccgtagagaacgcttcgccatgacggaaatcgccaaatcgctatagtaacagctggggtggattaaggcaaatcgcgtgtcggataaactgcaaaatcgcctccaaagacgaccaaggggagccgggctcaacgcgcccaaaactcccctcaggatgcgttcccctcttcggaggggaaaggaacggtttactccgcccagtccttgaaacgcttcatgccctcggccaaatcgtcgtcggcgagagcataagagaagcgcaggtaaccgggagcgccgaaggcttcaccgggaacagcggccacgtgagcttcgtccaacagagcagcggcaaaatcggcagaagtggcgcacaccgtgccgttggaacccagcggcttgcccagcaacgcggtgatatccgcaaacgcatagaacgcaccggtcggagtcgggcaatacacaccctcgatgtcgttcagggccgcaacaatcgcacggcgacgcacatcaaaagccttgcgcatctcgtatacctcatccagagggccggatacggcggccaatgcggcacgctgagagatattggccacattcgaagtcatatggccctgcaacttggtggcggctttggccacctcagccggggcgaccatccagccgacacgccagccaggcatcgcgtaggtcttggccacaccgttaagcaccagtagctggtcgcggcattccggcacggcagcaccgatgtatgtggtgcgcgcgtcgtcatagttcaggtgctcataaatctcatcggagataatccagatgtggtgctcaacagcccaacgtccgatggcttccacggtttccggcttccatacggcaccggttgggttgttcggcgagttgacgatgatggccttggtccgctcggtgcgggcagcctcaagcgcctccagcgacggctcaaagttcacgtcggcaccggcaaatacctccaccggcacgccatccgccagcttcacggcctcagggtagctggtccagtacggagtggggatgatgacctcgtcaccatcgttgagcagaatctggaaagcctcatatacggcctgcttgccgccgttggtcactactacctgatcggcgcttacctcgtagccggagtcacgcagcaccttggccgcgatggcctcgcgcagctcgggcaaacccgcagtgggcgtgtacttgtagttcttcggatcaaggcatgcatcggcagcggccttgaccacgttcgcaggagtcgggaagttcggctcaccggcaccaaaaccgataacgtcaagaccggcggccttcattgccttggccttggaatccacggcgagcgtagcgctcggtgccacagtgttgatacggtcggaaagaatctgccattgcgccatagtcatggctcttacgataaccccaacgcacgatgtttggaagtgtgttgtaggtctcaacaaaactggacatccgcatagggtctgtggtgcaatggagctgcgcgcagcgggttgggaaagcgtgccggaggagagattatggcaaagcatcacgaaagccatggcagtcgtgggactcgccgcagcacggtcgagccacgtgtggagtacagccgccatgccgaaacgcatagcgctcatggcagccagttgcactacgggcaacacgccagccaccgttccgctgccgcaatcgcagcacagcgcacgcggcatatcgccgtattggtggtagcagccgtggtggcagtggccttggtaatcaccgtcggtgtcgttgcgcatgggtggttcgcccggcagtctgcgccatccatgcaacagcagcttccgaccaccgcgcataaatcacttacccgtaaaaccgtgccgcagttggatcccggcaacatcgtcatcggtgtcaacggcagcgaaaccacctatgtgctcaagggtgagcagtatgtggaaggcggcgcacatgccatcgagccggaagacggcgtactgaccggcaacatcgtcactaccggcaccgtagacacgaacactcccggcgattacacggtgcaatacacggttcatgactcaaccggccatgaggcatccaccacgcgcacagtcaaagtagtggacacgatggataagcagaccggcggtattcccgtgctgatgtaccactatgtctacgatccggcgaatccgcctgcagacgttgacgcgaactggattccgaccacgtcactcgagcctcagctgcaatacctgacgcagaacaatttctattacccgtcctggcccgaggtccgcgcattcatcgatggcaagcacagcctgcccaagaacagcatcgtgatgactttcgatgatggcgagccgcacttcttccagtacggcgcccctctgctggccaagtacaaggtgccggccacatcgttcatcataggggccgatggcgaggcgctgaacaagatgaaaacctacgccacgccatatcttgagtatgaatcgcattcgttcgacatgcaccgcgccggcggcacggtcggccacggcggacgcatcagcgcaatgagccatcaggagattgtggatgatctcaagcagtcggagcaggtaaccggctccttgcaggcatttgcctatccgttcggcgataccacgccagacgcgattgaggcggtcaaggagaccggcacattggccgcgtttaccactcagtatggctgggccgatgttggtgccgatcccatgaacttgccacgcgtgcgtattcagggcactggctcgctggatacgtttatcgcggcgattcagtgaatacagcgagtggatgagggcaggctctggcctctcacagttctctcactacgcctatcagctccctcatcagaggggagcttcaacgcaatgacttacaccagtacaagattgtcgcggtgcacaagcggatgcgcgtactgatcgcccaggaaccgcttgagctgggccgtattgcgaccgagcgtctgcggaatctcctcggagtcgaagccggccagaccacgggccagatgcgtgccggattcgtcatcgatccatacaggatcgccggcggaaaaatcgccatgcacatcgagagcgccggcggccagcaacgatgcccgaccaccgcgaatggccttggctgcacccgcatcaaccacaatcgtgccgcgcggttcagccgcaaaaccaatccataggcggcgcgaagatccacgggccttgaccggggcaaacaccgtgcccaccggatcgcccatcattgcggggcctgcgtttgaggcgcatgtcagcacggtaggaataccggaaacggccgccacacgagcggcctcaagtttcgtgaccatgccaccggtgccgactttggatcccgagccggacacctggatatcgcccagcgcgtcgattacgttggacacatattccacgcggcgcgatccgggctgagcaggcggcgcggtgtacagcgcatccacgtcggtgagcaataccaacgcttcggcacgcaccagattggccaccaaagcagacagccggtcgttatcgccgaaacgaatctcgttggaggccagcgagtcgttctcattgataatcggcaccacgcccagatcgagcagccgatccaacgtacgttccacgttgcggtactgggtggctcgaatcgtgtcttctgcagtaatcagaatctggcccacccgaataccgaaccggccgaaggcagcttcatagcgggccatcagcaggccttgtcccacggcggcagtggcctgctgggtagccacatcagccggacgctcatcaaagcccaacgggccaaaacccgcggcgatagcaccggaagagaccagcaccacacgggcacccatcagccgtacctgcgccaatgcggcggcaagtgcgtcgagcttgtcagggtcgaggtgcccgctcggctgggtcagggagctagatccgaccttgacgacgatagtgccggcagcggcgatcatgcgccgtacctcggcctgacttggtgtgctcatttgctttccaattccgcctccgacggtggagctgtcaatctgcagccgaccaggactacccccgtctcgctgtgctcggaagctcccgccggcggaagcaacttcattattcttccgatgcgctatcgtcggcggactcgccatggccaaacaggctggtctcatcgtggcgatcatcatcgacggtcgggtcagcccagtggccggccttacgttcagccatcatcgcatcacgcacagccgcacgggcatccatcatctcgtggtactgggcacgacgttcggcattggagcggcggtgagcgcgcggatcctgctcctcgagacgcaaatccttgccgcgtgcaccaaggttggagccatcgagcatttcggcaccggcggaaatggtcggatcccaatcgaattccaccatgcgatcgcctcgtccgatgcgaatctcatcgcccggacgagcgcccttgcggcgcagttcgtcttccacaccgagcttggccagtcgatcggccagatagcccacggcctcatcgttgtcgaagttggtctgcatgacccaacgctccggcttggcaccacgaacctcgtagaacacctcgccgttgccgagctcacggcgttccacggtgaagtcgagtgcgttgccgccctcgtcagcgcggcgaggacgacgaccggtcctttcaagaggcttgatgaccacgcgggcttcttcttcggcctcctcgcggctggccacttcctcgcgcatctcatgcaccagctcagacagggcgaagttcagttccttcaatccctcatgggatgcagtggagatctcgaacaccttgagaccgagcttctcgaactccggacgcacaaattcagccaattccttggcctcgggcacatcgatcttgttcaggataacgatacgcggacgctcgggaatcggaatcgcacccagcggcaactccagcttatcggcgtagagcgcaagctcgttttccaatgcccggtaatcggacatcgggtcgcgatcaggctccagcgtggcgcaatcaatcacatgggcgatgatctccgtgcgctcgatatggcgcaggaattccagacccagccccttgccttctgacgcacccggaatcaggccgggcacgtcggcgatggtgtaccgggaatcgccggcgataaccacaccgaggttcggcaccagcgtggtgaacgggtagtcggcgatcttcggcttggcggcactcatcgccgcaatcagggacgatttgccggcggatgggaagcccaccaacgccacatcggcgatggacttgagctccagaatcacatcgcgctcttcacccagttcgccaagcagggcgaatccaggagcacgacgggtcttgttggccagtgcgatgttgcccaaaccaccggcaccaccttgcgcaacgacaacgcggtcgccctcatggcgcaaatcggcaagctgctcgccaggatgtttggtcttgccctgctcgccgcgcgcttcaaacaccacagtgccgcacggcacggggaggatcagatcctcgcctttggagccatccttgttgtcacccagacccatcgtgccgttaccggcagtgcgatgcggcatgaaccgatagtcaagcaggctggtggcgttgcggtcggccacgaataccacggatccgccgtcgccaccattgccgccgttcggcccggccaacggcttgtacttctcgcgacgaataccggccgaaccgttgccgccgtcgccgccacggacatggacggttactcgatccacaaaatcactcatattgattaccttacaaaaaagccgcgtccttacgggcgcggcttgaaaagcttaacgctatatcgctcaggcagcgatgacgtcgacgaccttgcggtcacggcgcacaccgaacttcacagagccatcagcgagggcgaacagcgtgtgatccttgcccatgccgacgttctggcccgcgtggaagttggtgccacgctggcggacgatgatgttgccggccacgacggcttcgccgccgaacttcttcacgccgaggtactgaggcgacgaatcgcgaccgttacgagagctggacgcacccttcttatgtgccatgattcatggtcctttctataactcaggcaatcgccgtgatcttgacgatagtcagcggctgacggtgacccttgcgacgagcaacgccagtcttgttcttgtacttctggatgttgatcttcgggcccttggcctcgtcgttcacaacctcagccttgacggacaccttggccagatcggcggcagcaagggtcaccttggcgccatcgaccaggagagcaaccggaaactccacggtatcgcccttcttggcgtcgagacggttcacgaggatggtgtcgccaacctcgaccttttcctgatggccaccggccttcacaatcgcgtacatattcgttccttttatgttttggaaagctaccttgcccaacacgcaccgagcctgcggtcagacaccgagtttcgaatttacacctacacgcggactaaagcaaatggtttttatctgcgtgtcaagcacgacacaccccggcttttcgcaaccgagggtatgcccgcatgaaacatttgtctaatgctactcctcctcggtgttgttggcggccacggcagcagctgcaatctgggccagtttggccttgacatcagcgctggagccggccggttccggagctggggcagtgcctcgaccatgcttgttggtcttgacgaacggatcaccgccgcgcaatgcgtacgggtcatcgtagtcggcggaaacggtcggctgatcgtgcaggataaagccacgacccttgcaagtcgggcattcctcggagaacgcctcgaccaagccctgaccgatgcgcttacgggtcatctgcaccagaccaagcgaggtgacctcggccacctgatgcttggtccggtcacgcgccaggcattcgactagacggcgcagcaccaagtcacggttagcgggcatgaccatatccacatagtcaatcatcaccatgccgccgatgtcgcgcagtcgcagctgacgtgcaatttcctcagaggcctccaaattgcaacgcgtcaccgtctcctcaagggacttgcccttgccgatgaagcggccggtgttcacatcaatggtggtcatggcttcagtacggtcgatgacgatcgaaccaccagacggcaggtagacctgacgctccatgccctttctgagctgggagtcgatctgccacttgtcgaacacgtccttgccctcatgctcggccgggtcccacttctccagcttatccttcaagtcgggggccatggtgtcgagatactcctcgatacggtcgtagaccttgtcaccttcgacgatgagcttgccgaagtcatcgttgaagatgtcgcgcaccacacggatagccacatcgggctcgccctgcaggagcttcgggcgcttgccatgccagaattcctcacgcttggcgttgatgcgctcccactggcgaaccaaagactcaagatccttgacgatggcttcctcggaggcgccctcggctgcggtacggatgatgacacccatatccttcggggcgatcttggagacgatgcccttgagccggctacgttcgcgttcggagagcttgcggctcacgccggtcatgccgccggacggcacgagcaccaggaagcggccggcgagcgtgacctgagaagtcaggcgggctcccttgtgtccgatcggatccttggtgacctgcacgagcaccgggtcgccggacttgaacgccaactcgatgcggcgtggctggccttcgagacgcgcggcgtcccagttgacctcaccggcgtagagcacgccgttacgggcctggccgatgtccacgaaagcggcttccatgctgggcagcacgttctgtacacggccgaggtagatgttgcccacggtctgcacttcctggatgtcggagacgtaatgctcgaccagaatgttgtcttccaccacggaaatctgggtgtgatgctccttctcgcgcaccaccatgaggcgatcgacgttctcacggcgtgcgagaaaatcctgctccatgagctggctctggcggctacgctcacgacgattgtcacggcgtcgctgtttcttggcctcaagacgggtggagccttccacatcggtgatctcatcgatgtactgctgcttgcgggaacggcgagtcagctgctgatcgtcctgctcatcaccgctctcggcattcttgcctccgcggcggcgacggcgacggcgggtaacggtctgctcctcgtcatcatcacggtcgcgctcatcgcgatcatcgcgacggcgacgggaatcgtcaccattgttctcggaggactcgctgtcgttgttggaagcaccggactcgttgcgggagccacggcgacggcgacggcgggaacgggtgcgggtggagtcggactcttcgtcgttctcttcttcagcaatcggcgcgtacgtaatgtcgtccagctcgaggtcttcctcaatctgctcgacttcggcggcagcacggcgctcctgggcgttcaggcggcgggaacggcgagaacggcgggaatcggactggtcatcagcgtcgaaatcatcctgagcctcattccggcgacggttattgcggctgtcatcgcggtcatcgtgatcatcgcggtcatcatgatcgccgtgatcgctgcggttcgaccggcgggaacgagacgggcgttcctcgtaatcggcctcatcctcacgggcgcgggagcgacgagaagagcgggaacgctgttcgccatcatcttcctcatcatcacgatcgtcacgtcgcatgtccgggagcaccggctcttggaacagcagggaagtcatcggcttgccacgacgggcggattcatgccctgcaggcagcgcatcaatcacatccagcacgcgctcatcggggttttcttcgcgcgcgtcttccgaagaacggcggctgcgagtacgacgggccgagcggggctcgtcatcgcggtcatcgcggtcattcgtagtggaacgacggcgacgcaccggacgatcgccatcctcatcggagtcgtcgaccgcagtacggcggcgagatgaacgcggcgcatcatcatcttcgagatcgtcaatcacagagcgacgacggcgaatcggacgatcgctatcctcatcaaaatcatcggatgcggcgcggcgacggcgcgatgggcgctcatcgtcttcctcgaaatcatcagacaccgtacggcgacggcgcaccgggcgcggcgcatcatcgtcatcagccacagcacgacgccgagtcggacgcttctcgtcatcggagacgttattgtcggcagttcctgtggaagcagatgcatcggcatcaggcaaagcgggtgcctcaaacagcggggcggcgtgttcctggacttgcagctcaagggatgcgccggcagcaccggtgccacgcactacacgacggccaccgcgacggcggcgagtcggctgcgatgcttcggcgttcggctcggaagctcccgaagcctgtgattcggtattggatacggttgagttatcggtttcgtcaccgacgaaaccttcacggttctcagtgggcacaatgctcctcgcggcacgctgcatcgcgacgccatccaggcctgtacgctcgtctcacaccatgctctcaccatggccgcgcaaatcctttgcgccgcgtaaaggcaacttcgtctcaagtctgtcctgcgaacggcggacaccggcgcttacgttgtctcgttctcgagagccgtaaggggatcaacgccattacacacgctgatggttatgcagaaccaccgtctttcagtatgccacactttttgcacgggcgcgcccagcgctctggcacaccacgacctatctggctccccttacacacggatgagccctatcttggctctcctctctgaggggagctggctgcgaagcagactgaggggagcctggattcaagccgagcactcccctcagtcacctacggtgatggctcccctcaaagaggctgagccgaaaaatctcacaccagccagtcttcgaggattgcggccatagcagtcaaatcagattcgggcacttgctcgtcgtgcttatgcgccaataacgggtctccggcaccgaggttgacggccggaatcccgagctgagagaaacgtgccacatcggtccagccaagcttggccagcggatcgcgaccagtgcgctccttgaccagacgaaccagttcctgcgcaagcggcgcgctcaagccggggcgtgcagaaggactctcatccttcatctcgatgccatagccctcaaacacgccaccggtggccacatgttcgccgttaccaagttcagcacctgcatccgcacccatcatcagcgccttggcctcagccaggttcctgtccggagcgaaacggtagttgacatgcacacggcattcgtcgggaatcacattcgtgcccttgccgccggaaatcaatgtggcgttgagaccctcacggtagtcgagcccatccacattcacagtcgcggtttcataagcattgagtcggttcagaatatcagcggccttgtggatggcgttctctcccatccaggcgcgggcagagtgcgcggcgactccgtgcgtgaccacatcgaaacggatcgtgccgttgcagccgccttcgatgccactattggtgggctcaccgataatggcaaaatcaccggcaatccagtcggggtgcgtttcgaccaccttacgcagaccgttcttttcggcggtgacttcctcgtggtcgtagaacacataggtgaggtcgactttcggagtggttcccgatgtgaggccatcaagtgtagcggcgagatacagcatcaccgcatcggaggccttcatatccgtggcaccacggccccacagcacacggtctgcgggatgggattgggagatttcctcgcgaatgagcggatcaccaggttcaagccacttcggagggaagttgtcgattaccggcacggtgtcgaggtgaccggccagaatcacgcgattcgacttgccaaaatcggtgctggccaccaccgtgtcgccgtgacggcggacggtcagatgcttctgttcattgaggaaagcctcaacctcatcggcgagcgggccttcatgatcggagacagagaagttctccataatctgggtgagcagactgttcaactgctcagcagtggaatcgttgcggttcaattcaagcgtcatgagtacagagtaccgcgtgacaaagcgcacagttcacccactacatgagattttgtcgccgaatacatattcatgtgtcacactagggtggcgaaagggaggaacatgccaggtctcatcagcgccatgcaaggcttctgcgttatcggcatcgtgattgcggtgggatatgtcgccgctcgaatgcgcatcggaggcccatccgctcagatggtgctgaaccgcttctctttctttgtgtccagcccgtgcctgatgtttgcgattctgtccaaggaaccgattttcgacatcttccatccatcaatcatcgtggcgttcttctctgcggtgctagtgggcgtggcgttcctggtgctcaatcagatgttcttccacctgaacgccccggatgccaccatcggcgcattgaactcgctgtatctgaactccaacaacatcggtttgccgattgccacctatattctgggcaacccggcgctggtggcaccgattctggttatgcagcaggccatcttcacgccggtgggcctgactgtgcttgatgtgaccaccaagggcaaggtctccgtcaaggagatcgccaagcaaccgctgcatcagccgctgcttatcggctcgctgctgggcatcgtggtctctgccatctccgcaaagatcggctggttcccggtgccgaagttcatattcgacccgattgacatgatcggagactctgcggtgccgatgattctgatggcgttcggcatgtccttgcacggcaccaagccgttgcagcagaagggcgatcgtccggccgtattcaccgtagcggtgctcaagaacgtgatcatgccgatcatcgcgttcctgctcgcctacttcgtgatgggcttccgcggttccgagctgtatgcctgcgtggtgctcgccgccctacccaccggccagaacgtctacaactacgcggctcgttacaacgtgggcctcactttcgcgcgcgatggcattctgatgagcaccatgaccagcccggtgtttatcgcaatcatcgcggcgctgctgagctgagccggcaactgtaatcaccgtaaaaaaacttccgcgaaatccaccgtaggattccgcggaagcctgagatatacgctacttgagaatcgccttaatcgcctcatactgctgagcagtgagttgcaccgctggctcacggatcagggtggaaatgttcagtcccttggccttgaccgcacccttgatggcggagatgaacaggtcggtctgatcgtacagcgccatcaggtggctgatgcgttcggcggcctcaattgcggtgccatagtcgccggcctcatatgcacggtgcagcgtaacgaaggtctccggctccacattggtcatgccgcagatcacgccatcaccgccggagacgcggttgacgagatagtactcgtcgaaaccggagaacaccgcaaaccgtggattcacggccttgaccgcgcgaatcaccttgcgggtgtggctgattgtgtcgaccgtgtccttgatgccgacgatgttcgggtgcgcggcggcaagctcggccacgagctccggggtcaagtcgctgccggtgcgcggtgggaaattatagaggatcaccggaagattcgtcgcttcagcgaccgcgccgaagtacgccttcgcgcctcccgcagtagggccgaagtaatacggcgaaacgaccacgagcgcatccactccacttgcttcgactgcccgcgcgaagtcgatcacattgttcaagttggtatcgcccacgcccgcgaacaccttgatgcgcccggcgacatgcttggccacgaagtcgaccgcctgcttcttgacgtccagagggaaggcatagaactcgccgatgctgccaaacaccagcacgccgttgataccggcctcgatcagatgatcgagatgctgcccccaacgttcatagtcgatgtcaccgtcgtccttggtgatggtgatggatgggcagatgatgcctgagaattcggcgctgcttgtcatgattgttcctttcgttacggaataggggtgccgcacaagcggcaccgggtttgcggcctctcccccagtcgtcctgcggacgatagccccctcatcagagggggcttgggtttagtcgatgttgtaagcgcggcgggcgttgttttcgaagaagtcctcgtcctcgccgaacgtgtccagcatgagttggaagtgcgtggcaaaggtcgagttgagttccacgaccggccagttggagctgtacagcaccttcttcgggccgaatgtgtcccgcacgtatttcacgatgtccgggtccaccgggttgtcgccggaaaccttgatatacgaattcggcagttcggccaacgctgcgagtgcggcgcacgattcctcatcaagcccgggcacgttgccgagatgatcgatgatgaccgtcacttcaggaacctgcgagaacgccttggccatgtcgcccagttccgggccacggttgcacagctcaaaaggcaatcccttggcggccatcacacgtaggccggcgatgaattcgggttcgagggctcggccccgtggctcggaatccacatgcagcggctccctgatgccatcggcgttgatcggaacacgcatccatgggcttacccgcccctgcagcatgcgcttcaggatcagagggctggcattctcgtacaacaaccggtcctcgagctcgtgatcggccgcgtcgacctccacatatacgccgccgaggaagttcacgccaaacttggcgtactgtgcggctaggtcttcaatcgtgtacttgtgttgcagcgagggcaatcctgccagccatggcagatcctgcgcatccggatcccagatatggaagtgggaatcgattacgttgagtgtcatgtcaggcctccttcagaccgatcttggaaccccagaatgcgtaccatgccacgaacaggaagcccgggaccatcaccaggatggcgatctcgatgcctgccgcatcctgaatcacaccgagcagcagcggaatcaacgcggcgcccacaatgctcatcaccaaagccgaggaaccggtcttcgccgcggaacccttgatacctttcagcgtcagggagaatatggtcgggtatccgatggaaatgaacagatacgccaccatgaacgcgatgacggagaccttgcccaggccaaggaataccacgaacatcagcacggctgaaatggtcatgtatacgccaagaatcttcgcgggatcgaatttggccatcaatggggtggtgacgaagcgtccgatggtgaacagcagggaaagcacggaaagcatcatcgctgcggtgccggctgtgacgcccgcgccccagtgcttgagcgcgtaggcggagaagaccgccatgccggccacttgcaggccgatgaaaatgaactcggcaagcacgcccaatgcgaagtgcgggcgcttgagcaggccgaagaaggagctgttctcggaggaggcgccgcccgcggcctcctcttcgtctcccggaggcgtgggcagcttgaacagcgcgaacacggcgagcaccacgaccagcacaacgccgatcacaatgtatatcgtgcgggtatcattcaggaactgcgtcttagcggcgtcgaagccggactcgcctgatgcgacggtggtgccgagaatctggccaagaatcagcgggccaacgatgttgccgacgccgttgaaactctgcgccatgttgatacggaacgattcgcccttttcatcacccagcttggtgatatacggattgcagttggtctccagcgatgccgcgccgagcgcgataacgaacatggcgaacaggaacaggccgtagctggccatgctggtggcaggaatcaccatgaacgcgcccagagcgaacaggagcagaccggagatgacgccgcccttataaccgaaacgcttggcgatcaagccggccggaatggccatgacgaagtatgcgccgtaataggccacctgcagtaatgacgcttcggcgctgctgagttctatgtagtttgcgaacggcgagttcaacgcgttcacgaggttcatggtcaaaccccagataaagaacagtgaggtcaccagcacaatggcgatggtcgccttggaaccggttgtgtttttggatgtcatcattgactccttagtgatacgagtttccccgatattgcctagcgagaagtggaccaccctgggccatgttggtaaacggatgacccagggcgcgggtgatacgggcggcatacgcggatacggcgtacggatggagcaatgatcaaagctccggaattgccgcgcgaatattcgggaaagggctgcttgtcagctcagcgcacggtcaaggtggacatagccgccatcgacgtacacccactgaccggtggtgtggctggagcggtcggagagcaggaatgccgcttcattaccgatctcttcggtggtggtcatacgatgttccagcggaatcttgtcggtgatcaccgacaggcgcgcctgctgggccgcttcatcgccaaaggtcttgatccaatcggcatagagcggggtccagcactcggagacgactatggcgttgacacgcacgctatcgtgcaccaatgcggcggcccattcacgggtcaggcccaggatcgcgcccttggcggccgcataggcgctggtcttgccttggccggtaagcgcggtcttggacgagatgttcacgatggatccgcggctttccttgagatacggcacggccgcgtggaccagctcgtaatagtgagtcaggttgccgtgaagcgattcctcgaactcacgccaagtagtggtctcgagatccttgttgtcgttctttccggcgttattcacaatgccatcgatatggccgtacttcttgtatgttgcttcgacgacgccggcgatcttgtcggtgtcgttgaggtcaagcaagtgcacatcataggtggtggtgtactgctcgatatccttcttgaactcgtcgagagcgctgtcgggtcgattaatcaccaccgggatggccccctcctgggccagttgcagcgtgatgcctttgccgatgcctttgaaaccgccggtgatgatgatgactttgccttcgagatgcagatccatgggaactccttcgtccatccttattctgcgtttcatgggtgttccatgtcacgcccggccggggcttcggcgccccagccggagtggttgtgtgttgttgtgttgagttgtgttgttcagttatgaatttccaattgcggtcagcagcgatacaggtacttctcggccgtctccagcgtcatttcggtaccgttgcccggagcggtcggagcgacgtagttgccgtccttaatctcagtcggatgaacgaaatgttcgtgctgattatcgacatattcaatcattcggccatccatcgtgccggataccgccacataatcgaacatcgcgaagtgacacacggcctcgcacagacccacgccgccggcgtgcgggcagacgggcttgttgaacttctttgccagcaggtattcgagcacgatctcctgcggaccggccactcgggtggcgtcaatctgcatgatgccgaaggcgttggcctgcaggtactgcttgtacagaatgcggctctgcatctgttcgccggtggcgaccttgatgggattgatggcgcgcgcaatcgtggcgtggccaatcacgtcatccgggctggtcggctcctcgacccacgccagatcgaagtcgtggaacttgttgatccagtcgatggcggtgggaacatcccacacctggttggcgtccacggcgaggcgcacgtcggggccgatggcctcacgggccttggacaagcggcgcagatcgtcattgatattctggccgaccttaagcttaatctgcttgaagcccttgacctgggtctcctccttggcgagggccaccatcttctcatccgagtagccgagccaaccgggagcggttgaatagccggggtaaccgacctccagcagatgcttgatacgctcggccttgcccttctgaccctctttgagaatcgcaacggcttcctcagggcgcagggcgtcggtcatgtagcggaaatcgagcgtggagaccagctcctccggctccatctcgcccagcagcagccacaacggcttgcccgcacgcttggccttgatatcccacaacgcggagagcaccgcgccgatggccatatgctccacgcccttttcagggccaagccaacgcagctgggaatcatgcacgaacaggtcccatgcaatgcgcatgttgtcgagcagttcctcggtgttgcgcccaatcagcacctgcgacatcgattcgatggccttgcaaaccacgtcgttgccacggccgatggtgaacacgaatcccacacccgtgatgccgtcgtcggcgctggtggaaatctccacgtacgcagaggaataatccggatcggggttcattgcatccgagccggaaagcgtcgttgaagtggggaatcggaagtcatacgtcttgactttggtgatggtactcatgtgttcgggctccttcgcctggtgtgaaccaacggctatatcgtacgtccgaataaagaaatttgcaagcctatttgcgaaaatttttattcaaggccggacaaagggcaagaaaacacggaattgttacggcacaatgcgtcataatggtgggaacatcgacgaaatcgtctcagtaattgaacggcgaatatccaagagggaagcaccgatggctaacgatacatccacccacaagctcaaggtcggcgagcttgcaaaaatcgccggcgtatccgcatccactgtttccaaagtcatcaatggcaggccaggcatttccgacgagacgcggagacaagtcgagcaaatcctcaaagatcacggttactcaaggcctctggtcaacaccaaactctcccccaccatagagctcgtcgtcgaatacattgagcacaacggcacgatggaactcatcaaatacgcctcatactgggcgcagcaggcgggcctcgccatcacggtcacccagaccaaccatggcgatgccacggaagactgtttccgcggcatcatcgatagaaatccccaaggtgtgattatgcagcagatgggcggtctgaccactcaagcgaagtctttgttgaaatcgcgcagtattcccgtggtcatcatcgacccaatcgataccgtcgattcggatgtgatgagcgtgtccatcgataactggaccgcaggataccaggccggcaaacacctgctgtcgctcggccatcgacgcatcgccgttatccgggggccggcgaacctacagaccagcatcgcgcgctatagcggattcaccgccgctctgcaacaggccggggtggatctgccggagtcctatatcgaacagggcgactacttccccgccgaaacaagctatgaagcagcctgccggctgctggaactcaccgaccgacccaccgcgattttctgctgcaacgacttatctgcggtaagcacgtatcgtgccgcacgagagcataagatcgcgttgccaaagcaattgtccgtcatggggttcgacgacattttccccgccggccaactcatgccctccctgaccagcgtgcatcagccgttcagcgaaatagcccaacgcgccgtgcagatgatcatcgacagccgcaagggcaatcagggtgatatgcacgtcatcctccccaccagtgtcgtcacccgggaaagtaccgtaccgcctcagtcatcggcccgataatcggccagattcaagctggcggccacccgattggacgcgaacgcacccaccgaaaccagcgcatagcacagcacaagcccgccgaagaagctggccagcgtggccggttcggtcatcgaagcggcgaacagaggggccataagcagcatggaacagccgccggccacgatcaccacgatgttgagcggggtgagtacctcgatgaatcgcgcacggttcaaggtcttgacatcagtgccctccaacaccagcatgcgatattcgccggcctgatcgtacacgctgccggcctgcatcacaccggagctgaccgcggcgagtacagcggcgaacacgagcgtcagaatgccgccggtgccgatgtcgcgaatgaacacggtgaacgggtcgttggcgtcaccgaccacggcggccgatccgaagaatccgcagatcgaggtgatgccggcgatgaacacggccagtgcaatgccggacacattgcgccacgcgcgcttcggattgtcgagaatacggcgcatggcaatcatcgtggccgcgtccttgggatgcttggccttcgccttggcacgagccgtgaccacccatgagcccgcgaggttcaccaacgcgaagcacagcagtatgaatccaagaatcacggcgtacatcaccgcttgtccggcctgcgccagcacggccgggttcttgaatacgaacatggccaccaccatgaccaccgtgaacagcaccacgcgagcgcccgaaggcaaagccgcggcggctcgggacgtgactcccagcggagtgatcaccacacggcgcaaggtgactagcgatgaaatcagcgccagcacggccacgccagcaagcgtggcgataagagccaacgcccccacccacaactgttcaaaggtaaagcgttgctcttggaacggaatcagcatgaccgccggcatcagcgcgcagtaaccggcgatgccaataagcgcgccgatcaccgcttgtcccgcagcatcgagcgctgtcagacgaacgacctgaccggtggtcgcaccggcgagacgaagcgcggcaagacgagcatcgcgacgggatgcggccaatcgagcggccgatccggcgagcgccacgaatggcacgacaagcaacatgcaggcgaataccgccaatgccacataagcaccgtagaattgggccagattcgtcggatcgctggcctgctgtttccaagcggccaccgtgccgggctggcaagcatcaagattaaacagacaggtgacggtatggtcggccgaggcacgccagataaagccgtgcactccacccagcacggtgaggaagatggcagtggctgcggcgaaagcgacgattgccagtatcgaggtatggccggtactaccacgcgaacccgggcggtggaacagcctccaaagggcgaaggtgttcatcgcttgcctcccgcgttgatgtcgtgaccgacggctgcagcagcgttggcgtcggcatccggctgacgcagcctaccgtcctgcatcattacggttcggccacagaagccagcgacgttgggatcgtgcgttacgaccactacggcagcgccgttatcgcgggcggcggccatcagaatgctcatcacctcacgtccggtggtctgatcgagggcaccggtcggttcgtcggcgaataccacggctggtttcacggcgagcgcacgggcgatggcgatgcgctgcatctgtccgccgctcatctcccccggccggttattggcgagggcacgaaggcccatgcgttccagccagagaatcgcggtgtcggtggcggtgcggtatggcatgccgtcgagcatcatcggcagtgcgatattttcgactgccggcaattcgggaagcagctggccggattggaagacaaaaccgaaggcgttgcggcgcagcttggtgcggtcggcatcgctcatggcgtccaagttcgaaccacggaaggtcactgtgccggcggtcggcttgatgatgccggcgagcgcgtgcagcagcgtggacttgccggagccagacgggcccatgacagcaaccgtctcaccctcacccaatgcgaagctcacgtggttcagggcaagtgtgtgcatggttggcatggcgaaaccgggctgaccattggcagcgggaaccgcagcacctgttccggccggcatcacaccggtaacgccatgaccggcctgcgcacgggccatactggcggtgtagtccataaccaagtcatgtgcctcgatcaccggagaccactgctgccgtgcgtcctgttgttgcactgcttccggtgcggtctgagtctgctgagattgctgtgttgctgtattcatactcccgagagtacggattgagcagaagcctgaccatcaggctgcggtatgaacctgttcaaccgccccacccacctctcatccgcaaggattagagattcgcagtcgatgcgacaatacttttatcaatggcaatgtggataacttcggaagctggaaccacataggtcgattcggctggacatgcgaatcacgcgaacggtatgttcatggaatcagcgtgctgcgcgctcgcaaatcggacataccaagcaaaggagctcacgtggccatcgcaatcgatatcccaaacacatcaatttcgtccgtacaaaagccgtacaataggggtatgactactgagaacaacaagaacagtcgttttgagatgaggctcactcaagaacaacgatccagaatcgatcaagcggccgagtccaaaggcctgacttcgtcgcaatgggcattgtcgaatctgctcgccgccgcagacagggatatccatgaagctcacatcattcgactgaacaatcaagcgtggaatgatttcaccgccgcattggacgaacccatgggaccacgtctgactgaattgttggaaagcgatccgatatggacgtgatcaacttcaccaagccccgacgcctgactgcaaacgacaacatctccggtttcgattgcggtctgccactggtcaatgattggctggcaagacatgccgccacggcgggtagacaaggcactgccgtggtctatgccaccttcaccaaggacatcaatggcgctgatatgctggctggattctacacactgagcgcatacagcattgaacactcgggggcttccggctggctgaaacgcaatagcccgaaccccatccccgcaatcttgctgggcatgatgggcgtagacatcagatttcagaccatgcacgtcggcagtcaactactccgagatgcggtacttcgttccatgaacgccgccgccatcattggagcgcgagcgctacttgtcgaaccagccaccaaccaagcagttgcattttacgaacgatatgactttcggcacatccccaagtcatccagaatgttcaccccactcaatatccgcaatcaccgatgatgcgcgatcggtaaccactattcagtgccggtcattatcggaatcgcattcaggcgcagtcattcttgcacagcagccagctcgtccagacgggcggcgaagcggggccagtcggttttcatggcggtgaggagcttgcggttgggcacgtcgtcgatcggcacccagcagacctccatgctttcgtcgtcgttggccttgggctcgacggcgtggccggacttttcgaaggcgaatacggtggtgtaggcccatgggccgtgatcctcgcggtaggagccgaccacctcgatatcctcgggtgtgatattcgcctcctcatagctctcgcgcagcgcaccctcaatgggggactcgccatccgccgtggcaccgccaggaatgccccatgtaccaccctcggcgctccatgcggcgcgatgttgcataaccacgtgggtcaccttgccgctcaccgaatcgcggcgagccagcaaaatgccagacgcaccgttggtgccccaatgcttgcgaccgcatgcgcaatccacccagccgtcgccaggctggtgcacattctccaccggcggcagaatgccggcgtgctggttgcccgaagccttgctttccggcgccagctcaccacggtctacgttccacaggtcagtccatttgacgcctaattcgccagccaaatgccgagccagcggcaggctgaggccgatgatgccgtgcggatcgccctcgatgctgtcaatgaacgcaccaccgaagccctcgagcgtgaacgaaccggcgacttccagcggctcgccagtggcgatgtaccgctcgatatcatcctcggcgaactcgccgaaatgcactttggcatgactcgcgccgcgcacagtacgtccggttgcaaaatcgataaggcagtggccggtccacagttcgccggtcgcgccgctcatacgcttcaatcgttcgcgggcgacggcctcgctgtgcggcttgccgtagcatactccgtccaagaggaacatcgaatcacaaccaagaatcagcggtccgactgtcacctcggtcagtcccgactgtccggcaatagcggtggcgatgggttcggtgacggtcggcatatcgatgccggagaagtcgcgcgtggtggcgatttccgccttggaatagtcaatgggcttgccagcggcggctttgcgcagatcttcgacggcagcttcgcgttccgaatccttgatttccttggccttgagcgggtaggcgatcacgcggtcaccggtcgcggcggcggcagtatcggccacatcacgatacgcacgatgaacggcctcggccttggccgtggccagaatcatcacgcgctgcttgatgctcagatcgtcgacggtgacgccttcttcacgggcggccgcttccagcgcagcaggctcatccacgtgcgagacgcgaattgtgggacagatacccgccgaatacagcacgtcacggcgaggcttggacttggaagcaagaattagcggaatggacatgacttaagtccttatgctcccgctggcgggagctgtcgaacgaagtgagactgagggtggtctctgccggtatggggggaccaccctcagaccgccggcggcggccagctcccgccagcgggagccttctcctcgacttagcgacgctcgatttcgacgccggcggtgttgatgggcaggtgaagtacacgccagcgaccggaagcgagctgctccgacgccagctgatcaatagcctcgcgggcgtcgccgtagtgcagcacaagcacgcagggaccggcaccggagacggcagcggcatagcccttggctcggaacatagcaatgagatcggtggatggcggcatcaagacaccacgatacggctgatgcagcttgtcctgcgtggcggtgaacaacagtgcgttggcctgggccgcagctgcggcaaacgaccccgcaggaactggctcatgaacattggccacggcttcagaagcgcaaccacaagcaccgtgagcggcattattgtcacggcaggcgcaagttgcggagtctgcagcggcagcagccacgccagacttgccctgctgcgcggcctgcgcaagtaccacgggattcatcgcggcaggcagcaggcccacgcgggacacgttgtagacggcatccttgtacggcagctccttgggcagcgcctgacgggccttttcggtggacagctcgtaatcaggtacgaacacggcagcggtgatggccggatcgaccggatagttgacggcatggaatccgccgtgcagcggctcaccaccaggaatggccactgaaccaacgccttccgcggtctcgaagtcccacgagacagtcagaccgccaaacaccgccggtgccacgttgtccggatgcccctcgatttgggcagccatgtcgaagatggcagggcgattaaggtcgcccgcctgcgcaaaggccgcagccgcggcgataccggccacgatggcctcagcggaagagcccatgccgcgagcctgcggaatactgttggtcgcctccagcgtgaagccgagacggcccagaccaaaagtggcacaggcacggcggaaggtggagaccaccagatgggtctcgtcgcgaggcaatgtatcggcgccttcaccgtggataatcacgtgagcgatgccgtcgttcggatcatcgttaagcgtgaacgtgagctcatcgtgatagtcgagcgccaagcccacggtgtcaaagccggaaccaaggttggcggaggtggcaggcacacgcacatggactctgttacagattggattcatggttattcctttggagcggaactcccctcagtctcactacgttcggcaggcgactgaggggagctccactcaaaataaatcagtccagcacgcgcaggatggacggctcaccggtcacgaagtcgagggactgcacagccttgacggtgttgcgcagggtctcttcgtcggtcaggtgagtcaccacgcgcagctgctggatctcaccgtcataaccgggatcggtcatagtgggcttcaagtcctggttcacgccgttgatggagacgccgttcttggcgaactcggcggcgatggcagccagcacacccggcttgtcgtgaataaggaagcgcacggcaaatgcggccttggaagcggtaatcggagccttcggcagattcttgtacagcggaatggaggggccagtgcagccagcggcaatgtgacgggcttcggtcaccacgtcgcctacaacggcggaagcggtcggagcgccaccggcaccgcggccgtagaacatcagatcgtcagcagcctcagccttgacgaacacggcgttgaaggagccgtgtacggaggccaacgggtggctctcgtcaatcagggccggatagacacgtgcggagacgccggcttcgctattctcgaccacggcaagcagcttgatgaccttatgctcggcggtggcggcggcgatgtcatcggcagtgatcttggtgatgccttcaacggacacatcgtcgatggttacggaggtgtggaagccgagggtggccatgatggcggccttgttggcagcgtcgtagccctcgatgtcgccggtcggatcggcttcggcgtatcccttggcctgagcatccttcagaacatcatcgaactgaagacccttggtggtcatctcgtcaagaatgtagttggtggtgccgttgacgatgccgagcatgctggtcaccttgtcgccgaccagggactcgcgcagcgggcgcaggaacggaatcgcaccgcccacagcagcctcaaagtaaatatcaacgcccttggtctcggcggccgcatagatttccgggccatacttggccagcagcgccttgttggcagtgaccacggaagcgccggattcgatggcggcaagcacaaacttgcgagccacggtggtgccgccgataagctcgatgacgatgtccgagttggtggccacactcattgtgtcggtggtgacgatggactgatcaatccacgggaacgcttcggttcccttcggatcaaggcaggcgacgccggtcagttcaatcggtcgtccgattcgggctgacagctcgctcttctgttccacgatcagtcgggcagtctgagatccgacggtgcccgctcccaaaagtccaacgcgaatagggctttcattcagctgtgccacaaggttccttcctattgatgccgtatcatccgccaaaggccgcggcagacgtccggttactatcctacgtaaggaatccgacacgccgtggcggaaaatcttcatcgaagcgcatgcggccaatatcgattgaatctttccaatcgccagtagccttgaccgactttgtaagattttccaacggcaatgtagctgtaaagaaacttaacaaactccgcatggcgcctccacggataccgtacgatggtacgtgcgcgatgattcatcgccgctgcgacagtccagtaccaatgaaggtactgcgaccgttcgaagacgaaccctcagagggaggttagaatgaaagaatatatatagatatatccagcgtatgggccgttcgctcatgcttccagtcgcctgtttgcctgcggctgcactgtttgtgggcatcggtaactggattgccagctttacgggcggagacgtcgtctccacattcctgacgaccgccggcggcacggtgctgaataatctcggtatcctgttcgctgtcggcctggcgttcggtatggccaaggatcagcacggcgcggctgctctggccggtttggtcggcttcctgacaccgatgacgttgctgaccaccgactccgcggcaaagttcctcggctacgccgacgcgactgcgttgcaggaaggcgccgccaacacattcaacgcgttctccaagatgaacaatggcaatgtgttcatcggcattcttgccggcctgatcgccgcggctatgtacaaccgcttccatcgcgtcaagctgactgcggccctgagcttcttcagcggcaagcgcctggttccgattgtgaccgtcgccgtaatggccgtcatctctctgctgctgctgttcatttggccggtcgtcttcggcgcgctgaccacgttcggcgagctcatcatgtcgcttggcccgatcggcgccggcatctacggcttcctcaaccgtctgcttatcccgaccggcctgcaccacgcactgaacaatgtgttctggttcaacatcgccggcatcgacgatatcgcccgctactggcagggcgccgcctaccagggcgacccggtgagcatcgccggttaccacccaggcatgtaccaggctggcttcttcccgatcatgatgttcggcctgccggccggcgcattcgccatctacaagaacgcccgccccgagcgcaagaaggctatcggctccctgatgctggctgccggcatcgccgcgttcttcaccggcgttaccgaaccgcttgagttctccttcatgttcgtcgccttcccgctgtacgtcgtgcatgccgtgctcactggtctgtcggtggccatcgccgcagcaatgggctggacgtccggtttcaacttctcggccggtttggtcgacttcggtctaggctggccgctggcaacaaagccttacatgctcatcgtgcaaggcctggtgttcgcagtcatctactacttcgtgtttgacttcgccatccgcaagttcaacctgatgaccccgggccgagaggccgaggaagcggccgttgccgatgaggctccggccgccggcgaagacaagtacatcaccatggactcccgcatctacgcggcgctgggcggtgcttccaacgtcaagtccatcgaaaactgcacgacccgcctgcgcctggtggtgaacgatacctcgctcgtcgatcaggatgccatcaagaagaccggcgttccggccgtcaaggtgctcgacaagaccaacctacaggtgatcgtcggtacggatgtgcaattcgtggctgatgcgatgaacgacatcgccaaaggtgcgaccgttggaggcgacacggccccaaaagcgtgacggcagcacccgctgccgcccctaaacccgcaggcacagcttccacagccaccgtgcttgccccggtcgatggcacgatcgaaccgattgaccaggtgcccgatgagacctttgccgagaagctcctcggcgatggcttcgcggtgataccgaagtcaggcacgatcgtcgcaccggtgtccggcaaggtgtccacagtcgctcaggccaagcacgccgtcggtatcaccaccgacgcgggtctggaagtgctggtgcatatcggcatcgacaccgtccagctcaatggagatccgttcaccgtgaaggtcgcggagggccaacagctcaccgcgggcgacccgatcgtcgaggtggattggaacgcggttcgcgctgccggtaagcccacggatgtgattgttgtgttcaccaacccggcgttggtagacacgctgtccatcacagctgcaggagccgtcaccaacggctctccggtaggtaccgtgaccaccaagtaagcaactgcttccacatagcaagagggcctcccgtctcgtggcgggaggccctctcgtatgcgttattgaacggcatcgaacagctatgccgctttaccgtcagctttgatccaagtccagcaggtcatcgatggtctggcggcgcaacataacatgtgcgccctgctcagacacggcgaccacggccggaatcaacgcctggttatagttgctggccatcgtgcggccgtatgcaccggtgaccggcacggcaagaatgtctccgcgcttgagatcagcaggcaaacgcacctcatggaccacgatgtcgccggattcgcaatgcatgccgcacacgcaggcaagcatcgtctcagtagagccggttcggttggccaaacgtgcggtgtaatcggctccgtacagtgccggacggatattgtcggacatgccgccatccacagacacatacacacgctcgtcaatcgggttgccggcactgtctttggcatcgctcaggtgcacatgcttgatggtgcctacacgatacagggtcacgccggctggagccacgatgtaacggccgggctcgaagctgatggccggggcgggcatgcccagagcacggtttgtgtcgctgaccgagccggccagacgagtgagctccacatcgatgtccatggaatcttcgccgtcggtgtaggccacggagtaaccaccgccgagatcgatttcgggcaggatgtaggcgtcggtggcccacagggtcttgcgcagcagcatcatgcgcttggcggcgtggatgaaggcatccgcgtcgtggatgttggagccgatatgcgagtgagcaccgaccagttccagcacatcctgattggccaggatggtcttgagcacggcagtggacggaccgtctgcgatggcttccatagcggcggcaagtaccttatccgtatcggagacttcctcatggctcaggtcgtacggatacttgacgtcataacgcagttcgcgtgccggtttgccgctcccgctggcgggagctatcggcgtagtcgactgagggtggtcattgccggcattaacgtccgactccgcaatacgcgcgttggtcgcggcaggtgtcacgtccgtcaggttgttcagcacgtcgagcactgcggcgtcggctccggccgccagcagcgggacgccgaacttctgatcctcgtgagcggtggagatgtattcgtgaccaccggcatgcacgccgacagtgacacgcagcatcacgcgggcacgcttgccgagtttacgggcgatggcggcgatgcgctccggctcattaggctcatcgaccacgattttggcgaagccctgttcgatagccagcgcgatttcatcatcggacttgttgttgccatgcagcactaggcggcggccgggcacaccggcagcgagggcgattcgcatctcccccatcgtgcaggtgtccacaaacatgccagcctcggcgaccagtcgcacgatttccttggacaggaacgccttgccggcaaagctcacgtgcgtggtggaggtgttgaatgcctcagctgcagcgcgtacgaagtgcttggcacgggccgatacctcatcggtatcgatgaggtaaagcggcgagccaaactcgtccaacagggattcggcggtgcggccatgaaatgcaatggcaccattggcattcacggccgtggcggccggccaaattggagaaataggcataatcacatcttttcgggggcggtaacgccgaggaggtcaagaccgttggcgatgacctgctggacggcgtcgttgagcttcaggcgggcggcggcgcgggccggctccgggttcttggcgatttccagggccatgcgggcctcgtcgtcaccacgggtttccggatcggtcagggccatcggcaccacgcgctccacgttgtaccacttgtggtaggtggcggccagctcttcgaggtagcgggccaccttgtgcggctggcggtcgtcggccgcggtggcgagcacgctcgggaactgggcgagggcggcgagcacttcgccatcggcctcggtgtccagcagggacaggtcggcgccctcgtagctgatgccggcggctgccgcgttgcggtccacgttcttggagcgggcgtgcgcgtactgcacgtagtacaccgggttgtcgttggtgtgcgaggcgagcagagccaagtcgatgtcgaagttctggttgtagtcggatcgggccagcgagtagcgggcggcgtccacgccgaccacggagaccaggtcgtcgatggtcacgacgttgccggcgcgcttggacatgcgtacgggcttgccgtccttcatcacgttgaccagctggccgatgagaatctgcatgttcttgccgggttcgtcgccgaaggccgcgcacatggccatcatgcggccgatgtagccgtggtggtcggcgccgagcatatagatggccacgtcggccgggttttcggcgcggtggcgcttgtcccagtagtaggcgatgtcggcggcgaagtaggcgaactcgccgttggacttgatgatcacgcggtccttgtcgtcaccatgcttggtggattcgaaccaagtggcgccgtccttgtcgtagatatcgccgtgagatttgagctcttcgatggcggcttcgaccttcttgtcggcgtagaggctgttctcgtggaaccagacgtcgaagttcacgcggaagtccttcatggacttctgaatctcgtcgaacatcatcggcactgcgcgcttgcggaattcctcgcgcacttcggtgtcgtcctcgccgagcggttcaccgtcatcgttcaggccctgatcccggtgggccaacgcggtcaggttcacgccgtcggccttggcttcggcttcgacgcgggcggcgatctcgttgatataggcgcccttgtagccgtcgcacggggtttcggtctggtaaccggcgccgccaagcttgttggcctcggcccaggcggcgaccagtgacttggcgaagcggttgatctgctcgccgtggtcgttgaagtagtattcgcgcaccaccttggcaccgttggcctccagcacacgggccatggcgtcgcccaccgcggcccaacgggtgccgccgatgtgaatcggaccagtggggttggcggaaacgaactcgaggttcagggtctggccgcccagatgggcgttgcggccgtactcgttgaccttgttcaggtgcttgtcgccatcgaccgcaggggccgcggcaagcacagtgtccaccacggcggcggccgaggcggaatcaagggtgatgttgatgaagccggggccggcaacctcgaccttggcgatgccgtcggcttcggccagtgcggcggcgaacggctcggccagatcgcgcggcttcatgccggccttcttggccagctgcatggcgatattggaggcccaatcgccgtgcgcgcggtccttcgggcgcatgacggcgagcttgtcgatgggcgggatcagctcgtcggtcagttctccggcttggccggctgcgacgaggttatgggcaatgttggaaatcagttcacttaaggcttcagggctcattcttctaaggataccgagaacggcgacacttgcggtccggtatgcctatagatcgcccccgcaatgttccgaaacataccaagcgaaaatcggccatcagcaatcccctgaaaacgttggaggctcgccggaaccgctatacataccgtcggtcggtatctatagtgatcggcaacgccgcataccgcataccgcagggaggccagcatggcacgtaacgcgcaccccgaggtgacgcgcaatcgcattctcgacgccgcgcaacagctgttcataaccaaaggctacgagcacacctccatccagaacatcgtggacgaactcggcgacctttccaaaggcgcgatctaccatcatttcaaatccaaggaagacatcctcgaagagctcatcaaccgggacaacgacgtgcaggacgacttcaacgaatcggtgatggaccgcagcgacctcaccgctctcgaaaagttccgcatattgtggcgctattcgataaccacacaggaccatgtgcagatcatgcgcgccgccatgcccatgctgagcgacccggtttcgttcgccgcaaacatgcggatctggagcaagcacctgcccgaacggttcctgccgctgattgaagagggcgtcaaggacggctccatccccaccgcatatccgcgagaggccgccgagctgctctcgctcctgcccaactactggctgatgccgtatttctatccggcgagtttgtccgagatggagcaccgcgtacggtgtctggcagccatgctcagcgcgattggcgtgccgattttcgacgacgaacttatcgaaatgaccgccaaaggcatgatgacgttcgacagactcccctcagccgcctgcggcgacagctcccctcagagaggggagccaaggaaaggctcacaatgaacacagcaatacaacgcaagaacgacaacagcccccagcgcccgccgcgttcccgcgacttcgtgttgttggtcgccggccagggtatttcgctgttcggcaatatgatgctgcgtttcgccatgtcgatgtgggtgctggacgaaaccggctcggctaccgtgtttgcctcggtactggccatctccatcgtgcccaccatcctgctctccccgttcggcggtgtgctggccgaccgcgtcaaccgccgcacgatcatggtggcactcgacgccatctccgccacgctcgtgctggcgagcgccatcgttttcgccgccgcgggcttcaatatcgcggccatcgccaccatgcaggtgctgctcgccgtactcggcgcgttcgagacgccgaccgtacaggccgcgcttccccagatgttccggcagtacggccctgccactatgcgccaaggcatggccgtgatcaatcaggttcagcagttgagctccctgctgccaagcttcctcggcggcgtgctatatgccatgttcggcattcgcctcatgatgatcatcaccatcgtgagctttgccggcgcggccgcgctcgaatgctttatccgtctcagcgcacctgaccgcggagacgaagaactaccgacaccaatcgaagacctcaaagccggcatacgattccttgtgaaagaccgtcccaacgtgttcaaactgttgttgttctcagccgcactgaacttcgttctcatcggatactccggcgtcggtttcccctacacgattcgcaccgtgctgggcttcaatgccaccgtgtatggcatcgccgacggtctgattggcgtttccggagtagcaggcgccttcatcgccggcctgttcgccgcaaaactcaccatgcgctggttgccaggattgatggccgcactcgcgttagccatggttccacagggcatagtattcctgctgccggtcggcgcatggaccaagctcatgatactcatcatcttcacttgtggcacaatgattgccagctgtttcactaacctcatcgccgtgcccaccatccaactcaatactcctgaagtgatgaccggcaaagtgatgtccatggccgcggctgtgagcatgtgcgcccagccgctcggccagatggtgtacggatgggcctatgaccggatgccggtagcagcagtgttgttcatctccaccgtattgttcggaataattacggcgatgctcgtgccgctgtccaaacaattcgaggactaaacggctcaatacaattctggcttctctcaatgagagaagccagaaagatcagtcgaagtcggcgccgagcgcctcgagcttgccacggaagtcggcatagccacggtcaatcaacgagatgccatgcacatcggacggaccggatgcagccagcgcagcaatcagatgcgagaagccaccgcgcagatccggcacgtcaatatcgcggccggtcagcggggtcggaccgaagatcacagcggaatgcttgtagttacgctgctggaaacggcagggcagggagcccaggcattcgcgatagagctggatggtagcacccatctcgaccagtggcttggtgaagccgaaacggttctcgtacacggtctcgtgcacaatcgacagaccattcgcctgagtcaaagccaccacgagcggctgctgccaatcggtcataaagccggggtgcacgtcggtttcgatggccacgggcttcaagtcaccgcccggatgccagaaacgaatgcccttatcggtcacctcaaatttgccgcccaccttgcggaacacgttgaggaaggtaatcatctccggctgggtggcacccttgacgaagatgtcgccgcgcgtggcaagcgccgcagacgcccaagaggcagcttcaatacgatcggtcagcgaagtgtgcgtgtagccttgcagctccttgacaccttcaatacggaacgtgcgatccacatccacggaaatgatggcgcccatcttctgcagcacgcagaccaagtccataatttccggctcagtggcggcaccagagagctcagtcttgccttccgcgagcacggcggccagcaaagtctgctcagtggcacctacagacgggtacggcaggtgaatcttcgcaccatgcagaccattcggcgcagtgatgtgaatgccgtccttatgttccttatccacggtggcgccgagcttgcgcagggtctccaagtggaagtcaataggacggccgccgattgcgcagccgccgagggccgggatgaacgcctcacccagacggtgcaccagcgggccagagaacagaatcggaatgcgggaggagccagacagcgtatccacgtcggccacgtcggccagctgtacatggctggcgtcgatggtcacgatgcccttctcgccgttcacgtccacatccacgccgtgcagtcgcagcaaatcggagaccacatgcacatcgcgaatctccggcacattcttcagcaccgacttgcccggcgccagcagtgcggcgaccatggccttgctcacgaagttctttgcgccacgcaccttgatcgtgccattcagcggcttaccgccctcgacatgcagcacgtcatccggattctcagccacgccactctcctatatacaagcaattcaaaaaacgctatcgtccagtttgccataacccatgtgctgactccgtgaaatgcgcctgaagccgaactccggcttggcataaccgactctttcatacccccttttgcacccccttctaataccacctttcgactgcaggacgaaatcttccgttttccgataaacgtgaccttcctcacagctgagcccacggtgttcctcatgcttctacgctacgattcagggcaatggcacctgacgccatggccacaagcaaaggagcattcatgaccacagtcgccgttatcggctgtacgcacgccggcacgttcgccaccacttcgattctcgccgagcatcccgattggaccgtccacgttttcgagcgcaacggcacgctctccttcctttcctgcggcatcgccctgtgggtgggcgaccacgtgtccgacccgaagaagatgttctactcatctcccgccgccttggccgaagccggtgcgaccatgcacatgcgcaccgatgtgaccgacgtggatcttaacgccaagactctcacctaccgctcactggaagacggcgatgcggcgaccgagcaaaccctcgctttcgacaaactggtcgtaaccaccggctcccgccccgtaatcccgccgattcccggcatcgatagcccgcacgtactgttgtgcaagaactgggatcacgccatcgccatcaaggagaaggccaagaccgccaagtccgcggtggtcatcggttcgggctacatcggcgcggagatcgccgagcagttcagcgtcaccggcgtcaagaccacgctggtggacgggctcgaccgcccgctagccaataatttcgacaagaccatcaccgatcaggtggcggcggcgttcgaagagcacggcgtgacgctcgcgctcggccagaaagtggtggaattccacgacaacgacgacaatacggtcaccgtggtcaccgaaaagggcgaatacactgccgagatggcaatcctggcggtcggcttcctgccgaacaccgatctgctcaagggcaaggtggacatgctaccgaacggcgcgatcgtggtggacgactacatgcaggcttccgtgccggacgtgtatgccgccggtgactccgccaccgtgttctacaacccgaccggccagcacgattacattccgctggccaccaacgcggtgcgccagggcctgctagtcggccgcaacatcgaggcgccgaccgtgaaatacctgggtacgcaggccacgtccgccgtgcaattgtatgatctctcgctcgccgcctccggcctgacccgtgcgggcgccgaacgccgcgggctcacggtccacgagacctcgctcaccgaggattaccgcccggacttcatgctcaccaccacaccggtcacatcaatcctgacctgggatcctgagactcgtaaggtcaagggtggccagttctgctccaaggccgacatttccggcgcggcgaacgtgatttccatggccattcaggccggcttcaccatcgaccagcttgccaatgtggacttcctattccagcccaacttcgacaagccggtctactacgtcggcgccgtggccatgaaggcggcggctgaggcctgatagctacaggctcgccttgatcttgcgggccagttcggcatcccacatcgcgccggtggcggacatcaccgagtccgcaccggcgtttctgtatgcctgataatcggcgggcgaaaccacgccgcctacaccgttgatcttgaaatcaagaccgagcttctcgcggatcgcggccagacgggccaccatgtcgagtccagcgccgcgaatcgcgttgccacacacgcctgaacggtcgcggcccgcgccgggcaaagcctgattgccgtccgcgtcgaccagtttggcggaaatcgtgttgatggtgctgaagccctgcacggtgccgtggcccacggtggagcgcaccatgagttccaggtcatcatcgctggggatgtaggcgagcttgaccatcagcggaatatcgccgatctcctgcttcacggcttcggtgatgcgccctacaagcagcggattatggcacagcagtcgattgtggccttcgttggggcagctggtgttcattaccatgagctttgcgccggtttccttgatcagccgggcggtggtggcgtggtcggcgatgtattcttcctcgctcatgccttccacgcgcgagccttggaagctcggcaccagcacttggccgagaccggcggcggcgatggccgcgcgcatgtccggctgccagacgtccgggctttgcgagggtacaccgaagctgttggagatggaaatcggctgttcatagttggtgtcggccagtacgccttcgtccagttcggcgctgcccgggatcagcgagccgtccgccgacttggggtgcacggcgagcacgttcgggaacggattgcacccccatgcgcgcgagcgcacggttttataggtggccaaatcgaagcccatgcggaacgcggccgtagtgaaccggctgttgagcagcggccccgccggaatgccaaacggcaggttgaccggctggcccaggaaggtgctttccgctggctccccctcatagggggagctgtcaccggaggtgactgagggggtcgccttcagcacctcggcgaacgccccaaacggcccttgctcatagttatcttcatagctatgcttcacatcgtagaacggctcaaaatcactcatagttcaacgataagccacgcccggccatcacacgcacaaatagcgcgcttacccctgcacgcctatacccagcacaatgaacaccgcaaaccacaacggttgcatgcgcccaccaccgtactggctgatacggccgagctgattgggctcaccatagctgtcgacgtgtgggccgccgagccaaaattcgcgggtgaaaatatctcgatgacgcatgagcagcaggaagccgaatgcgagcaataccgagaccagactgataatgccgtcgtattggacggtgatgttgccgttgaacgttgatacgccgatggcgatggcggacacgtcattggccaccgaatcgtgactcatatgggccagctcctgctcgcgggtgatacgtccgagtatccgttcggcgcgagcagcacgggcatcggcttcgaccgaacggcggaacgccgagccaaacgccaccagggacccaagcatcaacaggttcagcaccaacgttgccgcaaacacaattagcgaatactgcggcagtgtgatctcaaccggagctgcagcgctggagccgattgcatcgtccttggttatatcgttcagcgcgtcaatcgcaccccgaataatgctgccacccaccgatgctgattgcagcatcgcgaatccgagagcatccagtacggaataagccagtggtacagcgaccgcgacgcgtttggtaaacacgtaaccgactgccaaaaacaccgttaccaacgcagtgccaccagtaatccaccaaccttgcagaggcagcagagccgcggccagacaaaccgcaaccccaaccgcgacggttctcatcatgcaggcggcgaaccgataacgaaagattcggaatccacagcaccagctcaacaacaatcgcggcattgtccatgagattgctcaggggcgaatcgatgatatccgagccgttgtcgaacgaatagcccatcaatgagccgatgccgccggagatgatgccgactgcagccgtcaacagtatcgcgaacaaatgcacccaccagtattcaccgcgtgaggcacggccgtgaaagatgaacgtcttgcagaagaatcgcacgattagttacggcgcaatccatgccatcaacagcacttcgccgttatatctgcaaccattcggcgtagtgcagctcaccgtttcagcggctggtgcggacacggacatccggctgaacgcggtacccggtaccttgcagctggagctggagcagtgccgtgaaacatctcgtgaaacactgcgtggaacatctcgtgaaacaatcaatctccagtgccctgacgcatccacgcaacaggaatccgcacttgagcaacctacaagccaaagccgacgccggcctccgatacaacaactgctttggaggcacaagacagctccgaaacgtacgcatctgagacgaacgcagccgctaacgtttatatcgcgccgcttccccaccgcatcaccgtcacgggagccaacggactggcacagttcgtactcatcacccgccgcacccgggtacagtcggtcacccgctcgaccaccctgtggcgtgagccgcacggcatcgaacgcatcaccatgccccctgttcgtcaccaaaggtctcgacaccctccgctttctcttcctacaccgcgcagacgccgatatcctgaaccgttgggcggacggtccgaccgaagtatgaatttcaaaggtctcactggtgagcagccagtgagaccttgtttatgcgatggagggagttagataatgccgcggtcggccaacgggcccgtccaattatcttcaggctcgcgggcggactcgattttttcttcgggccagtgcttggcggggatggtcttggacttgaaggggaacttttcggcgcgcatcttttcataggcggcgatgtcgtcctcatgctggagcgtcaggtcgatatcgtcgtaaccgttcatcaagcgccaacgcacgtagtcgttgacctcgaacggcagggtcacgtcgccgcagatgacagtgcgggtctccaaagacacggtcatctcgcggccgggttcttcctccagcagcttccacaggagctcaacagactcctgcggcatgatcgcggccagcacaccgttcttggcggtgttgccgtagaagatgtcggcgaagctgggggcgatgaccacacggaagccgtaatcgtgcagtgcccacacggcgtgctcgcgggaggagccaatgccgaattcggggccggctaccagaatctggcccttgccggcgtactccggcttgttgagcacgaagttcgggtcgcggcgccatgcgtagaacagggcgtcgtcgaagccggacttggtcacgcgcttcagaaacacggcgggaatgatctggtcggtatcgacgttggagcggcgcagcggcacgcccacgccagtcagggtggtgagtttttccatggatatcaagctttcagttcttgcccccactggcgggggctgtcagctttgctgactaggggtggtcgccggcatacagcgtctcaagaccaccctcagtcagtcttcgactgacagtccccgccagcgggagccagtgtgcagtatttacaaatcggcgggggacgaaatcgtgccgcgaatagcagtcgctgcggccacggcaggcgacgccagatgcgtacgcgaccccttgccctggcggccttcgaagttacggttcgaagtggaaatcgagcgttcgttcggcaccagcttgtccggattcatgcccaggcacatcgagcagccggcgttacgccattccgcaccgaagtccttgaacaccttgtcaagcccttccttttccgcctgcagacgcacacgggaggaggccggcaccacgagcacgcggtgaatgttctccgccttgtgatgtcccttcataatcgcagcggcctgacgcagatcatcgatacgaccattggtgcacgaaccgatgaacaccgtgtccacggcgatgtccttgatcggcatgcccggcttcagacccatgtacgtaatcgcgcgttcggcggcggcacgcttggtggcgtcggcgatcttgtccggttccggcacgttcgcggtgatcggcagaccctgaccggggttggtgccccaagtcacgaacgggccgagcttggtggcgtcgatatccactaccttgtcgaacatggcatcgtcatcggtcttcaacgtcttccaatactcgaccgcacgatcccacatctcaccttccggcgcatgcggacggcccttcaggtactcgaatgtgatctcatcgggcgcaatcatgccggctcgcgcaccggcctcaatggacatattgcatacggtcatgcgctcatccatggtcaggttgcgaatcgcttcgccacggtattcgatgacgtggccctggccgccgccggtgccgatcttggcgataatcgccagaatgatgtccttggcggtagcatccgcaggcagcttgccgttgacgttgacggccatggtcttgaacggcttcagagacagcgtctgcgtggccatgacgtgctcgacctcggaagtaccgatgccgaatgccagcgcaccgaatgcgccgtgcgtcgaagtgtgcgagtcaccgcacacgatggtcatgcccggctgggtcaggcccagaatcggcgcgaatgcatggactatgccctgatcggcgtcacccaacgggtgcagtcgcacaccgaattccttgcagttcttctccaaagtgctcagctgcagagcgctcgtttcatccggattcggacgatcgatgtcaacagtaggagtgttgtgatcttcggtggcgatgagctgatccacgtgacgcggcttgcggccagccagacgcagaccctcaaatgcctgcgggctggtgacctcatgcataagcatcaggtcgatgtacagcagatcgggcgcatcgtcgctgcccctgcgcaccagatgatcggcccagaccttctcggccagtgtcgttcccatagcgtttcctccaaaaattccgcgcgaggtattgtgttcgcgccttgttcgtggtattagcctatgtggtgacgtttggcccggccacaagcaggccggatattgagatacgctcccaattcccccatggccaccctgtgagacacttccccgatttggtatttcactatgtgagatggcataatcgcacgtattatgactgattcccaagaagaaccactgaacaacggtctgaccgactctgagccagccgagaccaccaacgagaccgccgcaaaggatgacggggaaatccattccggcgtcggcgttcttgataaaaccgtaaagattcttgatgcgcttgaatccggcccgtctacgctcggccaactcgtggccgctactggactggcgcgaccgaccgctcaccgtctggcgatcgccctggagcgccatcgttttgtgctgcgtgatcagcacggccgctttgtgctcggctcccgttttgccgaactggccgccgccgccggcgaggatcgattgctcactgccgctggcccgattctgcagaccctgctcgaccgcaccggcgaatccgcgcaaatctaccgccgccagggcgaccagcgtgtctgcattgccgccatcgagcgcgcttccggcttgcgtgactccatccccgtgggcgccatgctttcgatggaagctggctccgccgctcagattctgctggcctgggaggattccgaccgcctgcaccagggactgcgccacgccaagttcaccgccaccaagctggccgcagtgcgcaagcgcggttggtctgagtccgtgaacgaacgcgaagagggcgtgtgctcgatttccgcgccgatccgcaacgcttccggccaggtcatcgccgcgatttcgatttctggcccgaccggccgcatgggtgccgcccccggccgccgttacgcgccgctggtcatggctgccggcaagtacctcaccgaggctctggtcaaagcagttcgctagtcatcacatacattgcccccgccggcgggggctgtccggcatggccggactgggagtggtcagcatcaccgctcaaaccacccccagtcgactccgtcgacagccccgccagcgggggcagttttgttatgcgctacctaaacaggccggacagctggctccacagcgacggcttacgcagcaaatcatcgccctcgccctcgcccggagcggcctggttcactgcatacgtgtaggcgcgtttggaactgggtttacccaccaattcgccgaattccagcaattgcgtgcgtggatcatagggatggcgaatatcgaattcaatcagccgtgtggcacgcttggccggcgccgggccgtatgtattgaaaccacaggtaggcgtggccatcaatagcagcccctcatattcgcctacgaatccgttgcgatggtcatggcccgccgccacaccgatatacccctcgcgcagcgcctcaaactcgtccgactcatccgggcaggagatgccctcccccagatacccgccggcttgggtgcgatcctcgtccaatacatagtaggtatccgcgtgctcgcgatagccctgcatggcgaaagccgcgttggcagccaccggtctgagcacctgataatactccggcagcggcatgtgctggaacaccattgatttggccccgatgcgctcaggcaaggccttgaggaaagccaaggtctctggcgaaggtgagccgaagccgcctccatgcgcataatcaccggagtttaccagcaccaggccaagtacgttgcgcgtgcagtccacatccatcaccggcaatgcgaaggtgccgggagcagcaggcgggtacatcgcggcggaatcactcgccgaggcatcagccgactcatcagcgtcttcgccattgagcgtctcaggcaagccgtcttcgcgacacatatatatggtctgcttggccagcgcatcgttcggcggattgatgcatccggggaactctcggtagatctcatcaagctcggcatcgctcagaccgcactggaaatcatggttgccataggtcaccgcccacgggatgccccgcgttgccaagggagcggtgaattggccgatggccttgcgcaccaattcgcgcgtgtggctcaatgcagattcaggaatcgtctcttcgcaccaacggcgtttgcggaagctcttggcaaaagccggatcatagccggcaatctggttgccggaaaaaatcactatatcggggcgagtggcatcaagactggcttcgatcagagacaccgtatctttggataccttggcaccgtcttggatatcggcaatctgcagcacgcgaaacttaccggaatgatggaattgcagacgccccaaacgcgcggaaatggaaaccgggcgatggtcccccacctcggccggcttgattctgggcttggagagcaagccctctggcgcacgctgtgtttccgtcatgacctccactgtacacacaaacgaaaaggcccgccggagcgggccttttctacaagttcaactactggagcagaatctctgcacaacatcatcgttgcaacggtaagtctttccaatgcccgtccaacgtaacagtcctcgtgaccatacactatttgtgggctctgctctgttcagttgttcttgtacctcataatctattcacgcctgccgcttcctgcaagttgaagacggcagttgtgctgtttttatcacaagtgttcaattgaactaagaaaacccggaaaaacgaatcaaaacgttcgtttcaaacccgtccgatgtttgattgtgttctgttcgctgcagtttacggcgtgtcgcaacggccaccaaccccactaccacatgttcaattgaacatgactcattcacataaacgaacatccgacaggagctcccaaccgactcccagcaaaccaacgtgaacacccgctgaattttggcgagttcagtagctttccggccactccagagcttacgatgtaagttatggcacagatatttgacgcaccctcgaaggcaatcctgcgcagtcagatcgcagagcatattgccgaaaacgacaacaacgaccgccgcgtcgaccaggaaggcgagacaccgctgcccaaagaccgcttcttcgaccgcgagctcagctggctgaagttcaaccaacgcgtgctcgaatgcgcggagaacgaagacatgcccctgctcgagcgcgccaacttcgccgcgatcttcgcctcgaaccttgacgagttcttcatggtgcgcgtcgccggcctgaagcgccgtatcgactcgggcatcgccgtgccgtccgcagccggcctgagcccgcgccagcagctgcgcgccatcagcgaaaccgcgcatcgtctgcagaatgagcacgcacattacgcgattgacacgattctgcccgagctggaaaaagagcacatcgtgctgctcacgtgggacaagctcacctccgccgagcaggagcgactctctcgctactaccgccagcaggtgttcccggtcctgacaccgctcgccgtggatccggcccacccgttcccctacatttccggcggttccatcaacctcgccgtgatcgtggagaacccggcatccggcaaatcgcacttcgcccgcgtcaagatcccgggcaacctgccgcgactggtgcccgtggacgacatgaccgacgaggaatccaaagacgagcgctatggcttcatcgctatggaaaagctcatcgccgcacatctggaatccctgttccccggcatgatcatcaaggaagcccgatccttccgcgtgacccgtaacgaagacatcgacgtggaagaagacgatgccgagaacctcctcaacgccatggagaaggagctgctgcgtcgccgcttcggaccgccgattcgtctggaaatcacagacaccaccagcccgttcctttcccagctgctcgcggaccagctcggtgtgagccaggacgaggtgtaccgtctgcccagcccgctggacctcacggtgctcttcgaactcggcggcgtggatcgccccgacctgaagaaccgcccgttcgtgccgaccacgaaccgccaaatcgccgaggtcgagtcctcccgtgcgcaggacattttcgccgccatccgcgagcgcgacatcctgctgcatcacccctatgactccttctccacctccgtgcaggccttccttgcgcaggccgccgcggatccgaaggtgctggccatcaagcagaccctgtaccgcaccagctccaactcgccgatcatcgacgccctgattgacgccgcgcacgcgggcaagcaggtgctggctctggtggagatcaaggcccgcttcgacgaggacgccaacatcgcctgggctcgcaagctcgagcgcgccggcgtgcacgtggtgtacggcatcgtgggtctcaagacccactgcaagctcatcgaggtcgtgcgtcaggaagccgacggtctgcgccgctactgccacgtgggcaccggcaactacaacccgaagaccgcgcgactctacaccgatctgggtctgctgacctgcgatccggtggtcggtcaggatctgacccgactgttcaaccagctctccggttacgcgccgaagtccagcttccaccgtctgctggtggccccgcgtaccgtgcgcaccggcctgattcagcgcatccgccgcgaggaggacgccgcacgcgccggtaaggaagcgtggatcaagatcaaggtcaactccatcgtggatgagaagaccatcgacgccttgtaccgtgcctcgcaggccggtgtgaagatcgacatcgtagagcgcggcatctgcgccctgaagcccggcgttcccggcctgtccgagaatattcgcgtgcgttcgattcttggccgcttcctggagcactcccgcatctacgctttctgcaatgcggacggcccgcagatcggcgagggtccggcttccggcccggaggtctacatcggttcggctgacctcatgcaccgtaaccttgaccgccgtgtggaggctctggtgcgtgtcaccgccccggagcaggtcgacgggctcatcaagtacgtggacctgcagatggccgactccaccatgagctggcacatgcagcccgacggcacgtatgtgctgcacaccaaggacgacgagggtcgtccgctggtcgatagtcaggaatacctgattcgcaagcaccagcgccgccctagctcgcataactgattccactcgatgctcccgttggcgaaagctgactgagggtggttaatgatgcccggctcctcttgtatgaggttgccgggcatcgtcgttcagagaacaaaactacgtagcggcagtcgattgccctacaatacaagggatgggtacgaacagcatgagacgaatcgtggaggccgccggcggcatcctctaccgatggaaagacaacgtagagcccgagcaggcatcgtctccgtcggcgaatgccaacatcgccaccgatggcacgatcatcacgaacgccgcgcatgccacgaatacggcagacgatgctgcgtcatcctccggcgcatcagacgcagccccctcctcaacaggggccgacgctcccctgaccggcataatcggacaagcgacgcacgtcgattcggccggctcttcagccaaggatgcgaacgacccagcttccgccgacaatgtgctcaatcacatcgaactctgcgtggtgcatcgcccgaagtacgacgactggagctggccgaaaggcaaagtcgatccgaacgaatctcaccgtcatgctgcggttcgcgaaatcggcgaggaatccggcctgcctgtgcagcttggcccctatcttggcgatatcgaatatccactgtccgaggaaggcagcaaacggcgccataccaaggatcgcacggtggacactaagcacgtccagttctggatggccacgccaatcagtgcgattgacaacctgcgccgcactcacgcgtttggcccggtgcatcgggcggatatcggcgaaatcgatgaggttgtttggctcaccccggctgaggcacgcaagaaactcagccattccaccgataaagacatcctcgcgctgttcgttgaccgggtgcaggagggggcgctggatgccgtgccggtgattattgtgcgccacggcaaggccgaagcccgcaagctgtggaaaggttcggacgccaaccgaccgattacgccgaaaggtgcgtctgccgcatatgcgctgaaccgtgagctcgcctgtttcaatccgacccgcctggccacctcgccgtgggtgcgctgccaggagacgctggaaatgttcgcctggcagaccgggcgcgacatggttcatctcgacccgctcaccgaagacgcctttgccgccgaccccgatgtcgcatgggaatgtctgctcagtgagattgattttgcgctggagcgtcgtcagcccacagcgatatgtatgcaccggccggtgattggcggtatgtttgaacatctgcgcaagatgtgcgcttcgacggctttgagcaaacgcctgatcgccaagacaccgttcatgccgaccggtacggcggtggcgttgttcgtggtgccgggcagctcaaatgccacgggcaagactggtgacggcaacaacgctgccggccttggcgctgaagtttcggcttctgccgaacaggccagttcggctggccacagcagctcgcctaatcactcggacagtgctaatcagccgctttgcgccgacgtaaccattatcgatattcagaaagtgcaaccgcttgtctactaggcccgcattccccgattcctccaattcctcggctgccgccgcagccgcccacgccgcgcataatggtaccgccggcagcctgggccccggttttggttctttgcgcgcggcgggcgcagcgtttggcccggctcgcatgggctccggccgtccagcccgccctgctcagctcgacccagccgtagccgatggcctggctggcggattggatccgcaagcgttgagcgagatgagccatctgtctgccgcagcactgctggatcgcgtgcggcataatgaggacccggaagtcgtgcatcgcgtgctaacgctggtggagaccgtcggcgtggatgaaatcgccgaactatggagtgacgccgaacccgattcgttgcccggtgtgctgtggcggctgtacatgctgcgcacatggatgcgaacgaaccgcgactcgattgcccacctatggcgcgtgggtgaaccggtggccaccaccgcgtccgccatcgccggcgtggatcaggcccccgccgaagacgacatcgtgcgactggctgattcgattctctccggcgcgtttgtgggcgatttcgccgtggcgctggagcgtgcggccgcgtttaccgacgtggtggcattgggcttgcgcgtggaggcacggcgcatggtcgagcgagcaacggctaatggcggcattgcttcacccgctgacgagaagaccgcacgtacgaaggcagcacgcctcatgcacacctccgccagcctgctctccaccaccaaggacttccagcacggtgctaacctctggcgccgcggacggctggagtaatagcttgtttatctcccctgatgggccgagccgcaggggaaatgcaggatgcgttgccgggcgagaacgatagtcgagctaatggattggccgaaggctctgattgcaggacgaggtgtccatcagagggggcggcattgctttgcaacgaagtcccctctgatgggggagcagtcacgggcgatgcacgtgactgagggagagacccaatccatcacttcaacatcagccatcagctgacatcggccttccccggcgcgccacggctcatcgcaaactatactgaatatccgcgtcggaccgtgcttaagccccgggctccattttttgccgccgcgagcggcccttgcgccgacaggcgctttcgcggttcggcgcttttcttctttccatcactcgggacactccttcatgcaattgcaacagcatccccatcattctttgcgccatcagcggggcaaaaccgcgattaaacccaagagccaccccgctgagcaaccaaaacgggacagcactgcgattcaatcgcagaaacaccccgctgagcacgtctcagcgacgtaaaaccacgagttaaccatgaaatcgctccgctaagcaatctaagtgaggtaaaaccgcgattaaaccgaagtattgccacactgagctcgactcagtgaagcaaaattgcgagttaaccgacggattgccacactaacaaccactcagcgcggcaaaacggcgattaaaccgaaagaccaccccactgagcccgtctcagcggggcaaaaccacgactgagtcaacggttcgccccgctaaggtcggcgcgcaacggcataacccccaatcccgccgaataatgctccatttcagttccgattcagccgcaatcctcgagccaaaggagactcggatggagtcggctccgtagaacagggctccagcccaagcaacaacgacagcaccgatacggaagaggccgccgaccacgcctgcggatggcaagccgcaggatacggagagggactgttctcccccgaatcacctgagtacaattccggaatctggtagtcgaaagcatcggcagcgcgaaccagtccatcagccacgcgcagtgcctccgcctcataaccttctgcacgaagaccattcatcacgatggcactgtcatgggcccacaccgatccgcaatgatagctctcaggccagtacccaccagccagtgtgctcatggtacgcacgccatagccgctgagcatgtcatcgccaaccaaacgggccaccacatcgcgcacaccctgttcatcaagaatgcccgtgccaagcagatgcccaatattgctggtcaaggaatcaaccggcttcttgtctcgatccagcgcaatcgccggatagcggccattgccgtcatcaacccagaaaacctcgttaaaccgggtcttcagccgcttggcccatgcgcgccaatcctcagctccaggacgcccgaatttctccagcacatccgcgccgagtatggccgcctgataggcatatccctgcacctcgcacaaggcgattgggccgtcagcaatgcgcccatcattccagcgcacggagtctcccgagtccttccagccctgattgctcagaccgtggccagtgcgatcgatgtattccaagaatccatcaccatcgcaatcgccccaatcacgcagccaggcaagtgcggcctcaaggttcggcagcaacgcctcaatctcctgctcaggcgcaccccagcgcaaggcctcagcaagcagaataatccacagctcggtggcatcgattgtgccgtagtacagcggaggcaagctggtgccgtcattaaatgcaccggtctgcaccaacggctcagcacgcagttcatgcatgattttgccgggatcagcattggtctgaatatcggattcagtagcttggaagtgcgccagagtacgcagtgcgcccatcgcggtacgagtcgtcagcggcaacatgaaacgtgcagcccatagggaatcacgaccgaacagggtgaagaaccacggtgcaccggccgccaaaaactcatcgtccggcaaagccggaatcgacatccgcaaaccatcgagatccctcaaagaggtattcacccaattggagacacggttatcggcggcctccacctgaacatcggcccacgggcaatcggcattcgccgcgataacggcattgcgcggcgagctcaccgcaatatgcagaccgactgaagtctccgcgcgagcaggaatcgtaacctgccaggagatcacgcaatcaagaccatcaaggatgattgacggcaccccactaccatcctgcggctccgcggttaccgtggcacgcagctcgccgtacgccacctctgcggaacatgcatcatcgggcactcgggagagaataacctcaccgttagctgcggcagaggatgacgcaccacctttgatctcctgcatcgaagccatgtcaaagcgcaatttcactgagaaatcaagcgtcaccggatcagtcatcacgctacgcaacacatatcgctcatgcagggcatccggttccagagtgcgattctccgtgatacgaaccgagggatccaccgtcgggccatcaacattgcgggccaccatggaagacacacccactcctttttggggagagttccatgcgatcgctgtgggtgcctcaccgttcacaaccggaatgatgcgtgagatgatacgagtatctcccacataaaatccggcgatattggccgcccccgcgtgctgctgcgatgcgtccacagtgccgtctgcggtttcccacagttgggcaggcgccacaacaagaggcttcatgtcgtgcatccatggctgtcggatacgctcagtgctgttcatatgttctccgttgattgttgaaaagcgaatagttcttgttgcgcagacccgtcattccttgacggagccttccgagctgttcatgatttgcttctggaagatgaagaacagcacggcgacggggatggtcatgatgacggcagccgccagtttgaccgggtattggttaccttgggacagctgaccactggccaacgaggcaacacccttggtcaacgtggtcaacgccgaagactgagtcgaaacaatgaagtgcgacagctcattccacgagccctggaaggacagaatcgagatagtcacgattgccggacgtgccataggcagcacgattgaccagaaaatacggaatgttcccgcacgatcaatcatcgcctgttcctccacagaccgcggaatcgactcaaagaaattcttcatgatgaacacgccggccgcatcgatgagcaacggcagaatcatgcctgcatagctgtcgtagatgccaaggctcttgatgatgaggaacttcggaataagcagcaccaccatcggcacactcatcacggcaagcagcaggctgaagatgacattgcggccacggaagtcaatacgcgcaagtgcatagccggccagggaatcgaagaacacacgacccagcgtgaccacaatggtcacgatgaacgagttcttgaaccataccgggaagtccgagttcaggaacagcttcttataggctgccgtcgtccagatttccggcaccagcgagaccggattggcggtggcatcggcatcggttttgaacgaggtggcaatctgagtgacgaatggcatgatgtagatcactgccaacacaatcagaatgatgtacaggatgatgccactgtggaagaaacgcttgagccatgatgcgctgttatcgccacgcacagtgttggataccttcgacttgctcatatcagattcccctttctgcgctatcttcggcaaccgccgcatcagcggtctgcgccctggcagcagctggccgccctactctcaatgtggcgagttcttcgcggtccaatgcgcgcgcctcggctttcatggcctcgtaatcggccctgcggcgtcgagacatcttcttgtccttcatcacccagcgctgaatccaggtcatgacgatgatgatgacgaataggatgaaggagatagccgcgcctcgaccccattcctggctgttgaacgctgcagtgtacgacaggtacgcagtggtcagcgtggtctttgccgggccaccctgagtacccgtataaatctgatcgaacacctgccatgtaccgatgatgcccaatgtgacgacggtgaaaatcgtgggcttcaattgcggcacggtcaccttccacatacgctgccacggcgttgcgccgtccatgatcgccgcttcttcagtgccttcgccgatgctctgcagcgcggcaacgaacatcagcataaaagtgcccgaagtggtgaaaataaccatgaggatgatggcgaccatcgccaccgaaggcccggcaagccaatcccatgcgctgacgccaaggaagctgtgttcggccagcgccgccggcccattcttgacgcccaaagccgacaacaggatatggatgatgcctcgcggatcgttgaaccagttgggaccgttgacaccgaaccatttgagcatggcgttaatcggaccggccgcgttgaacaggaacagccacaacacggtgattgccactgagctggtgaccgacgggaaatagaacgccgtgcggaagaagccacgcgccttgaggatcttacggttcagcattaccgcaagtcccagggacagcagcgtctgcagcggcaccacgatcaaggtgtaccaagcattgttgcgcagagccgtgccgaaatcgctttgcgcgagacccggagcggtgagcacgtccctgtaattctttagccccacaaaatcgacggacgaaccaaacggcgtgcctcgaccgctccaattcgacacactcacccacagcgccatgatgatgggaataaacatgaacacgccaaggatgatgatcatcggcagaacgaacagccaaccggatatctcctggcctttgtgatcaatgcgctggcgttcgaccttgttcgcacccaacttgcgtggcttcggtgccttttgtgatgaggacatgctccgactcctttgttgataatgttcgcgattccgattgcggcggccgacggtcgtctcggtcagagagcgaagaccgccgcaatcgatggaatcagtagattcggctacagatccgggatctacttgaggatggcctcaatgttggtctgggtcttgtccagaatcgtcttggcgtcgccggtcttcagaccttccaactgcgcgttgaggtcggtgatcacgtcggcggcacccttggcggtcggcacggtaaccgagtagttcaggccatccatgaaggcgctcaggtcagggaactcgctcttccacttgtcggcgagcgtcttggtggcgggcatgatgccaaaggccttggcgaagtccataaccacgtcatcgccggtcaggtattcgaccagatcgacagcacccttctgatccttgctgtcggcggcgatgccccagccgttggtgaagtgcatggtgcccttgccggccgggccttccggcagctcgacgaccttgtacttgacgtccgggtagtcggcggacaggccgccggtgatccagttgccttcgatggtcatggcagccttcttggagccgaaggcctcgccaccccagccggtgccgaggtcggaggcgtacttgacggtgtcggagtcgagcagagtcttgacctcttcaaggcccttaacgctcgcgtcgctgcttgcgatggccttggtgccatcgtcactgaccagaccaccgccggcctgcttcaggaagacgccgactcgtgcgtattcgccgttgaacgccagtccaacatgatcagcggtggtgagtttcttggccacatcggcaagctggtcccaagtggtcgggatatcggcatcggtcaggccggccgcggaccacatgtcggtgttgatgaccagctgcaaggtggacacatccttcggggcagcgtaaagcttgccgtcataggtgaacgtctgcagcaggttgtcgtagaaatcgctcttgttcttcagctcgtcgccgtaagcaagcaaggagccgttggaagcgtatccggcgagctgctcgggagctaggtagaacacgtcggcgggatcaccgccggcaaatccctgggacagttgctgcgccatatcgttggcaacctgcacggtggccttggtgccggacttcttcgaccatgcggcaacggccttcttgacggcctcggtctcggtgtcacccgaagaaccgatcagcacggtgagccctttcgagctgttgctggtcaggccatcggacttggcggaatcatcgaatccactgcctccgccgcagcccgccagaagcgccagcacggccaccgaagccgcggtcatcacggtcagcttgctcctcatcatcgtgtttcttctttctcgagcgctatgcccgtccttgtcttcatcatcattggttaagttatgcaatcattagaacgttcaaataatcgctattccttaagtttcggctccacaggaaccaaaaccattggtactcgatttttcagtcatcgactcagcattgagaaatgatgacttaatttttacgttctaataagtggctatataataaacaccaatatttgaatctgtcaaatcaggtacgattattggaacgaaccaataagtccgagcaccactgttcgagctgtacatgaacataaagggaagcactatggtcagcatcaaagacgtcgccaaagctgccggcgtctcgccccaaaccgtatccaactgcatcaataaccccgcagtggtcaagccaaccacacgcagacttgtcaacgatgccatcgctctcctgaattacacccccaacgcgtccgctcgccgcctgcgaacccaacgcagcaacaccataggcatcggcatcgcccccgtaagctattcacaggtatacgatcgcttcctgcatgcgctggtcaccgaagccgattccaacggcattcgcgtcatcctatacaaaaccgactcgcaacaggatgaaatacgccaattcgaggcgcttaccgcccgcggcgacgtcgaagctttcgtgctcaccgacaccactcacaacgatccacgactcgaatggctgcatgaccatcatcagtctttcgtcctgttcggacggccttggggctcagcggatatgcacgatcccctcaccccctgggtggacgtagatgggcgcgccggcattgcggacatgacgcagcacttgatactgcacggtcgcaaacacatcggattcatcggctggccaggcatttccggaacaggcacagatcgttaccgcggctggaaggacaccatgctcgccgcgaagatggccactgccgacgaactcgaacaactttacgaagaaggcacggacgacatcaccgccgggcaaaccgcgtgcatctcgctattggacagacgtcctgacctcgatgccattatctgcgtcagcgacacgctggccattggcgccgccaccgcgctgcccaatgacaccgatatcgtcatcaccggatttgacgacaccgcttccgcccaatcaatgggtctgcccagcattgctcagcctttgaccgagatcgcgcgcaacattatgcacatcatccaaaatcggcttgacgcaacgtcgcctgcgcatacggcgtcgtctctcacgtcggaatcccctgacaattgccacattctgctgccaccgtccatcgtgattcggtagacggggttccaggaacgcaaacccacgatctaatcgtaaaagcgccccgccgaatccatctcagtgaagcaaaacctcgattagaccgaagaaccaccccaccgagagccactcagcgaagcaaaaccacgagttaaccatgaaatcgctccgctgagcgatctgagcgaagcaaaatcgtgattaaaacgaagtattgccacactgagctcgactcagcgaggcaaaaccgtgattaaatcgaaagaccaccacgctgaaagccactcagcgaagcgaaaccgcgatcggctctagaaaacacctcgctgaacctatctcagtggagcaaaatcgcgaataaatggacaatccgcaccactgagactccctcaacggcgcaaaactgcgatccaatcggacatgtaccccatggaacaggatgcgcgtggcccgcacgaggcaatcccccccccggggggcaaactccaattcggcgggtcgagaaacttggactaggctggggagtatggaacttcacgttttgaatcatccgctggttgagcacaagctcaccgttttgcgcgacaagaataccccttcctccactttccgcgagctcgtctctgagcttgtaatgcttgaggcctatgaggccacccgcaacctgtccgtcgtggccgcaccaatcgagacgccggtcgccccgatgaccggcaagaagcttgccaagccacgtccgattatcgtgccggtgctgcgcgcaggtctgggcatgctcgacggaatgacccgcctcatgcctactgccgaggtcggtttcttgggcatgaagcgcgacgaggagcaccccacccagcaggtcacgtacgcaaaccgcttgccggaagacctgtccggccgccagtgcttcctgatcgacccgatgctcgccaccggcggcacgctggttgccgccacgcattatctggccgagcgcggcgccaaggatgtgaccgcaatcaacatcatcgcggctcctgagggcattaagtacgtcgaggagcacatcgacccgtccatcgacttcaaggtcgtggtgtgcgcggtcgacgaaaagctcaacgacaagtgctacatcgtgccggggctcggcgacgccggcgaccgtctctacggagtaattgattaacggagcgtataccgcctttcctcagcactcgacgcaccatagtgcgccttcggcttcggacagcggtctccgcacacgttaatcaattcctcatgattgactgatttttgggctcccgctggcgggagctgtcgaacgaagtgagactgagggtggttgatatcggaaactgaccaccctcagtcggctacgccgccagctcccgccagcgggagccaaatctatggaatgaccttatgcagatcgacattattgcgccgggacgcgtgaaggaacgttaccttcgcgatgccattgacgagtactccaagcgactctcgcgctattgcaagctcaacatcattgaagtcgcggacgagaagacgcccgaccatgcctccgagggcgtggatcgccaaatcaaggccaaagaaggcgagcgcatagccaaacatctgaaggacggcgcattcgtcattgcccttgccattaatggcaagcagctttccagcgaagaactggccgcgaaaatcaatgacctaggattgcgcggtaccagtcatattcagctggttatcggcgggtcgatcggactcgatgatgcgatcctacgtcgcgccgatttcctgctgagcttctcgaagatgacgtttccacatcagcttatgcgcgtgattctgctggaacagatctaccgtgcctacaaaatcaacgccggcgaaccgtatcacaaataatcactgtcttggctcccctcagggggagccaagttgcttgctcacacctcgtcgggtacaaacgcctcgaagatgtggcggtcgaaatacggctcacattgagcaagctcctcactggaacgcacggtccaggaaaccgccgtggcgcccatcgagcgagcgagcttgacctgcggcgaagcaccaccagtccagtcatacgccacaaaatcaggacgagacaaccaattaaacgccagcaatccggcagtccattcagccgcaccatgcttatccagctttgccggccagctcaactggccacggcacacctcaggatgatgctccttgtaccagttcaccgcacccgggtggaaggactcgaccacgtaaggcccgtcatacgcctcgagcaacgcatgacccttttccatcagctcttcgctgcgctcgtcccatgcacgattattgctgaacttgtattccacaatcagcggcgcacgaccggccaccacgtccaaaacatcagagaacagcggcacatgctggtaatagccttccggggctgcggacggcgtgacgaccagaggcgggttctcgccggcacccggcagaggctcagccttgagatcgccggacttaccgttcgggaacagcgggatgcgggtgagctcgtcgtaggtcaagtcctcaatcaaccgcgaatctccggccacacgcagcaaatcagcatcatgcaccacaaccacttggccatccagcgtaagttgcacgtcaagttctatgccatagccggcctcgcacgcggcagcgaatgcagccaaggaattctcaggcgcaatcggaccagttgtatccgcactgccatagcctgccttgatggccatggcacgagcgagtgccacataatcgtcgttttcagcgatggattgccccgtggcatcggactgggcgctgacgggattgtcaccggcgtagtccgcgatatcggcgacattcaccaagccggaaccggcatcatgcagaccgcgatgcgcataccagacctcgggaatcgagggtacgaaattgcggcgcttgtcattgaatgtgcgcggggccacggcccacactgcggcacctgcggcggccacgccggccagcaccacgtttctccagagcttcgacgacattggaatccttcctgttggactgcctctagcctaacgcttctaccagccattgtggagtggttggatcatccggcttcaacgcacggtcagggtgattggcgcgcagcggctcccaactgaaatcggccaacagatcggcgggtttgcaagggattggagcggattgtaaacgtaacagccaagcacaatagccaatgatttgttcaggggtcacgccacgggctcgcagggctcccatatccagagagcgttcgcgcttggctaaacgccgaccggccgcgttgtcgatgaggggcaaatgcacatacttcgggtgttcggcagatactcgtgcatcgctcgcgcactccggccggaatcctccggccagcaggcattggcgaatccacatctgcaatgcagtggagcgtagcaaatcacggccacgcacgatgtcgtcaacgcccatatccaaatcatccacaaccacaacaagctgatagccgaacagtccatcagctcggcgaatcaccgaatcgcctacttcatgaggcaaatcgtaatgctgtggaccgtaaacacaatcatcaaaacttgtaatacagtcggcaattccatcgccacgcacaggcgttgacgcttccgatgacgtatataggttcgcaaacgggccgtccgacattgccctcggttctggcatggcgatgcgaacggagtgctggtcgccgcgagctagtcgggaatgcaccccgccgggatgattgcgaagcaaatgacggcaggtgccgggatagaccatgaaaccgtcaccttcgttgggggcggaagccgcacggatgtcggcacgcgagcagaagcagggatatagcacgcctcgcgagcgcaagcactccaatgcatattcgtagcgttctgtgcgttgggactggaatatcggctcaccgtcccagtcaaggcccagccaacggagatcatccagcatgagccgatcggcaccggcaatcacgcgcggcttatccacgtcttcgatgcgcatcagcatgcggtcaccacgagagcgggccgaaagccatgaggccagcatggcatacacgttgccgatatgcatgcgtcccgatggtgtcggcgcaaatcgtccggtcactagccctcccttcgtccgccaacactcactttcctaccatatgcagcagtgaacaccttgatatcacggttcttccactcttgggaaacgcaattgagacggaccgggaagatacttccgtttcgaggggctgatttcgatgttgcgggaggtctacttccgtttcaaggggctggcagccaagtaggtaaggccccaaaacggcggaatggcgttgccataaagccactgatacttgcggttcaatggatgagcagcccctcgaaatggaagtagacctccgaaagagggcaaatcagcccctcgaaatcgagatagacccacaaagacgaacaggtgggtatgactgctaccatacccacctgtttaagagattttgcagagaaaaaccactgtagcgaagccgcccgaactcccctcagtcagcttcgctgacagctcccctcggagaggggagccagtgattgtcacttgtcttcggagacgttgtctacgctcacgtccggatcgtcggaggcaatctggtcactcgcccaggcggagagctccaggtgttcgccgccggtctggtcgacgagcacggtgtcgccgtcgtggaccttgccggccagcaacatgcgggccagctggtcgccaacttcggtctgcaccaagcgacgcagcggacgagcgccataggccgggtcgtagccggtgttggccagccactcgcgagccgaatcggtgacgtccagcgtgatgcgacggtcggtcaggcgctgggccacgcccttgacctggatatccacgatgccgccaagctcctcgcgcgtaagcgggtggaacatgacaatatcgtccaaacggttcaggaactccggcttgaagttcatgcggaccgcatccatcacggcctttttcttggcgtcggcgtccatgtcctcgttcacgaggaactgcgagcccaagttggaggtcatgatcaggatcgtgttcttgaagtccacggtcctgccctgaccatcggtcaagcggccatcatcgagtacctgcagcagcacgtcgaagatctccggattggccttttcgacctcatcgaacagcaccacggagtacgggcgacggcgcacggcttcggtcagctggccgccctgctcgtagcccacgtagcccggagccgcgccgatcaggcgcgagactgaagccttctccatgtattcggacatgtcgatgcggaccatggccttctcgtcgtcgaacaggaagtcggcgagcgccttggccagttcggtcttgcccacaccggtgggaccgaggaacaggaacgatccggtcggacggttcgggtcggagatgccggcacgcgaacggcgcaccgcgtcggacacggcggcgatggcttccttctggccgatcacgcgcttgctgaggtagtcctccatgtgcagcagcttctcgttttcgccctgcatcaggcggccaacgggaatgccggtccagtcggagacgatttcagccaccgagtcggcatccacgcggtccggaaccatcggctcatcagccggattctcggcacccgcatcagcagattcggcatccgcgctttccgcggcggcgagctccttctgaatggccggaatttcgccgtacagaatcttcgaggcctcagccagatttccctcacgggtgaacttgtccgcctgcacacgcaggtcatcgagcttggcacgcaggtcaccgaccttgttatggccggcctgttccgcatcccaacgcgccttgaggccgctgagcttctcacgggtgtccgcgagttcggcttgcagcttgcccagacgctccttggacgcgggatcctcggccttcttgagctgcatttcctccatctcaagacgggtcaccttgcgctgcagctcatcgatttcctcaggcgaggagtcgagctccatacgcaggtgggcagccgcctcatcaaccagatcgatggccttgtccggcagctgacgacccgaaatgtagcggttcgacagggttgcggcggcaaccaacgcgtcatcgccgattgtcaccttatggtgagcctcgtaacgctgcttcaggccacgcagaatggcgatggtgtcttccacggaaggctcgcccacgaacacctgctggaaacgacgctccagtgccggatccttctcgatgttctcgcggtactcgtccagcgtggtcgcgccgatcagtcgcagctcgccgcgggccagcatgggcttgagcatattgccggcatccatggagccttcggccgcacccgcgccgacgatggtatggatctcgtcgatgaaggtgatgatctggctgtccgcgttcttgatttcgttgagcacgctcttcaggcgctcctcgaactcaccacggtacttcgagccggccaccatggagcccaggtcaagggagatgagcttcttgccctgcagggtggtgggcacgtcgcccgccacgatacgctgggccaagccctccacgacggcggtcttgccgacaccaggctcaccgatcagcacagggttgttcttggtacggcggctcaggatctgaatcacacggcgaatctcctggtcacggccgatgaccgggtcgagcttgccttccttggcggcggccgtcaggtcggtagagtacttctccaaagccttgtacgagccttccgcgtccgggctggtgactttcgcgccgccgcgcacgccgggcacagccttacgcagggaagcggcggtgacgccgtttttctccaggatttcagccgactggttcggcttgctggccgcgatgccgatgagcaggtgctcggtggagacgtattcgtcgcccatctgctgcatttccttctcggcctgggcgatggctgcggtcagctgacggctggcctgcggctgcgaagtgctggagccggacgtactcggcagcgcgaccaaagcgttacgcacggcagcgccgatggcctgtgggtctccgcccgcggcctcgatgagggagcgcaccacgccgttttcctgacgcagcaacgcatccatgacgtgcagggtctcgacctgcgcgtttcctgcggcggacgcactctgaatcgcgtcgccgacggcttcttgggccatagtggtgaacttctgttccatatcgtattcctccatgtcatgcgttccgctgcgtctcgtcttgaggtttcgcacgccctgcgagcgccgtagcagaccgcaatatgtcgttatctgatatgttcaaccgacctgacgcctattctattcccaaaagttgagtgtaagtgactcaagttttggaacccgcgcaggttttcgagtgaggaaggttagagacggcgccagaaatggttgaaattggtctgttttggggttgatcactctcagtccgcttccgcggacagctctcaccagcgggagcaagcctagacgggcgtccacaatatgcgccgggaggcgaaatatgccccgcgacactcctatactcgcactcggtttgttgtgcgcttgaaccgctctccgactactgcggctagcgcgttgtgggataagagaagaacatgattttccaagccggttcgctactgctcgttattatcggcgcctacgcactcaagcacgtccatattttcggcgaacgcgattacagggttgttcaaggactggtgttcaacctcacgctgccgtgcgcgattatcctgtcgttcgccactaacaagcacgatatgcgcatgctgtggattgtgctgttcggcttcttcgcctgcgcggttccgctgttcatcgtgtatatcggatcgcgtggcgacgagaagaactaccgcgccttccaaatgctcaacgcctcgggactgaatctcggcgcgttctgcctgccggtggtgcagacctttatgggcgcatccgctggcttgccgatcatcatgctcgatatcggcaacgccaccgtggccacggcaggttcactgaccatcacgcgcacgctgctgcatatggacgagaacttcaaatcgctgccgcttatcctgcgaatgcgcaacattgcccgtgattttctgagttcgatttcgttcgacatctacatgctgatgctggtgttcatgttcctgcacatcacgattccgcagccgatcgtcacaatcattacgccatttgccaacgcgaacgctttctgcgccatggcgatgatcgggctcatgatggagattccagacaaccgtaaagacaaggtggagctgggcaaggtaatcgcctggcgtatggcgttcggcgcaattatcgccgtagcggcatggttcctgctgccgtttgacatgagaatccgcgaaatcatcgtgctgggctcctttgccccaatcacgattttctcgaccaagttcaccgattcgttgaccggcaatgccaagctcgccggcttctcattaacagtgacggccatcatcagcttggtggtgatgaccgtcttgcacgcgcttctaccgggagcgtaaggcgcgtttttgagtcctacgcccgcacaatcacgttgcgcagatcgccaataccctcgacgtgcacaatggtctcgtcaccgggatcaagatgaccggaagcattcggcgtaccggtcatgattacgtcgccgggcagcagtgtggagaagctggagattgcggcgatctgctcagggatgccgtgaatcaggtttgcggtggtaccggatgccatcggcacgtcctcgccgttcagcgtgaacgaaatctcggcgtccttccaattcaggtcatcacgcatcacaatccacgggccgagcgggcaggaggtatcgaatcccttggctcgcgtccatgtgggatcgatgccctgcaggtcgcgcagcgtcacgtcgttcacgcaggtgaagccaagcacgtaatccattgcgttctcaacggtcacgttcttggcaatacgacccatcaccacggccacttccggctcgaagttcatgtccttggagcaggccgggtacacgatcggatcatcggggccaatcaccgaggtggacggctttgtgaaaatcaccatgttctcaggcgcatgggcgatttccgaatggccggcctcgtgcatgaactgggcgtgcgcctcatagttcttggccagaccgtagaccttggaaggaatcactggagaaagcaggcggatgccatcgccatcaaccgggtaacgattaccggtaggagcgacttggtcgccggccaacggatgaccgtccagctcgatgaggtagtccttgccgtccgtttcgtccttctgcacgaaggcgtagcgcggcgaatcattcaaagaaaaacgtgcgagtctcatgactccaagactacgcccagcccgcgcccggcaacgactattcctcccacggccggtcaatgccacgccgcaggaatctcatcacctattcattcgctgatggaaaccgctggagagtagacggtaaaagcaggggaccattccgacacaccattcagctgctcaagcgcacgatccaaatcatcgatatcgatatcgccagaatcgtcgtagtcgtagtggtcgtcataatagtacgaatcatactgatcgtccatgtcgtcgtatctgctgtatgaataatccgaccgcaaatcattcgtcacggcatcgaccatacccgaaaagagaccgacgataatcatcacaatcagcagcagatagatgcccagctttgctacgctgatgatgatgcccgcaatggccaagcctttgcctttgccgccctgccgtttgatctggttcaagccgatgatgctgaaaatcaaaccgatgattgaggtaaagaacgagcagacaaagcccgcaatggcaaacccgttgcactgctgattggccgctgggggcatgtagccatactgctgggcatagggctggctgtagttcggattgtactgctgcccatacggcgttccgccttgagcgtacggattgtacggtgtctgcggaggcacggaaccgccaccaggataagtattattgggctgctgggatccagcctcgccggatggatttgcagcacccgaatcggattcagatgaaggcgccggagcctgctcgggctgccacggcgactgccccgaaccggcataaggattggtgttggaatcagtcatagcctctgctccttcagcttgcgcacgcctcgcgatgaggcatgactttcattctatccccagtgacaatcgtaacgaaagacgcgcgagaatacgacatcccctttctacagcccctagcaatcgaactcctacacagttagacttgtgatatgagacatcgtcgttttgccatggtgcttctcgtaccgctgattgcgctactcgcttcttgcgggacgccccaatctgcgccgaccactgaaccaaaaaagcagcaatcctcgcagactcccaagagcaacagcaacacggattccaatcagcagaagactgttgtcgatgacccaacccagggcgactggacagacgcctactccggccccagtgatctggacggggagcttgacgaagcatggctggattgcgcaccgcacaatgcgcccgatcccgaggcattctcctggaagaggtctacagatcacagcaaagtgtggatgcacgccactgagggcggtatggatggctcgtcacagcgctcctgcatggccgatgaactggatattgcggacaccgcagatctcagcgactcgtggactgtgacgtcgctgggagattatgaccgttatcagaagcgcagcggcaacgtcattaatatcgtctggcagtacagcgacgcagtcaaaaagtcgctcaccgtggaatctgattcgtatcgcgtcaccttgccctactcgtggcacaacaaaatcaccacctcggtggacggcagcaccatcgccgtcaccgaccgagaacacccgaaatatgcgctatgcacgttccaagtctcggattccagcaacgccggagacataggtaccagcctcatccagaaatatcaggccggcaacacccccgtgcagatgtgggccacacgatgggcatttgccgccgcctccgacccggcctccatttcggcggacgatgctgaagacgttaccgatctgcaaaccggaggcaccgttgaatatgactccatctccgcccagattcgcgccggagacacctcaggcgtattcgccatagacgactacctcaaagcgcacatcgccgtcagcggtttgtagtcaccccaaagaatcaacaagtccgaagccgtcatgattatcgttggcataatcatgacggcttcggacttggggttggattcgttgcgtaatcgcgcaatcggctgttacttggccagcagcggtgcgacccgctcctcgtaagcggtgagggcggtgtcgatcacgttgtgcatgtcgtagtacttgtaagtgccgaggcggccgccgaacacggtgttcggctcggccttggccttggcctcgtactgggcgtacagtgccttgtccgcgtcggtgttgaccgggtagtacggctcgtcgccgcgctcggcgaagcggctgtattcctcccacaccacggtcttgtccgggttctgggagtcgtggcgctccgggttgaagttcttgaactcgatggctcgggtgtagggcacgtccgcgtcggagaagttcatcaccgggcatccgaagtggtcgccctcgtcgtagcggacctccttgaagtccaccgtgcgccacttgaggtcgcccagctcgtagtcgaaatagcggtccaccggacccgtgtacaccaccggcacgcccgcggccttgagcgcggtcttgttgtacggctgggattcgtcgaagaagtccacgcccagctccacggtgatgcgcgggtcgtcgatcatgcgctccatccacttggtgtagccgtccgagggcaggccctcccacgtgtccttgaagtagcgattgtcgtagttgaagcgcacgggcaagcgtttgatgatggcggccggcagctcggaggggtcggtctgccactgcttgccggtgtagttcttgatgaacgcctcgtacagcgggcggccgatcagctggatgcccttgtcgttgaggttctgcgggtcggtgccggccagctcgcccgcctgctcggcgatgagcttctgcgcctcggccggcgtgtagtgggcatggaagaactggttgatagtgcccaggttgattggcagcgggtagacttcgccgtcgtgcgtggcgtacacgcggtgcacatagttggtgaagctcgtaaagcggttcacgtagtcccacacacgcttgttggaggtgtggaacagatgagcgccgtacttgtggatctccgcgcccgtttcctcatcgatatacgagtatgcgttgccgccgatgtggtcgcgcacgtcgatgatgtgcacgcgagcgccggtgtgctccaccgcctgctgcgccaccgtcaggccgaacaggcccgcgccaacgataacgagatcgggatactgggtggtttcggaattgttcggcacaccggccatagcaagcaacctttcacaggtcatgttcgttttaccgaaaacccatgttacccgaaagcaagaaaacaaccaacaaaaccaagcacacaataatgcatatcgccagcaaagcaagcaagtttattttttcgaatatttcgtttattatggtatccgagcaatgccacaacaataaaatcccgacgaagaggataaccaatgagcacgcgcagcatctcagagagctccgcgacttatctgccgaacgcagaagaccgacgacagctcattgacatcaaggaatccctatccgccctccaggaagaaacacagcagctactcgataaacagtttgatgccatggcagcccagaacgattttcccgtggcaatgctgaaagtgcccggctctcccgaccgtccgctgacacccgagctcgcagacgtgctgttcaaagttgccgaccagctttcccgaggcaaggctatattcgttgccccatatgacaccaaactcaccacgcaggacgccgccgactatctcggcatctcccgccccacattggtaaaactgctggagcaaggcgacattccattcactcgcgtaggcagacataggcgagttatgctgtctgatttacagcattacgccgttacgcagcacgataaaaacatgcagatttttgatgccatcgccgcagatgaagatcctcgcgcaacactcgacaacccgctgatttcgtaaagcaccaagaccaacggcaaaggagcgcacgacatgagtttccccgttttcttcgatacctgcgcgctttttggcgggcttgtcaatgatttgattctccgccttgccgaagagcaagcattgctgagttacaagcggtatccacaaatgccagaagattatgcgtacatacttcagcacagcggagtgccgaaactcgcacgccatatctacccaactctcgatgcattgaacgggaactaatggtggcgaacgttctattggtatcgtatttgtacaaaggaatagcacatgggcttatcgccaagtctgccgaagtacaatttgcgcaatgtaagtcagacattgcctgcccgcaaaacaagaaaaccaccgcaccaagttttgcaggcagacattgcatgtcagacgggcgcactaacgccctcgtcaaagaccgctactcatagttgcggtgtcgggccgccatttccgcgtacccaatattatcgcgctcatgcagtccgtacacgatggcatcaagcagaatccacgacgctgtttcccataatgtgcccatgggttgcacagtcggtaccaaatcaccagagcccttatacacagatgcaggaatgaacaccacatgatcggataaacgcgcagcatcgctattcggcacgccagtgacacacaccaccgttgcaccggtatccttagccaactgcgcaatcgtcaatagatgtgcgatctgccctgatccgcaggtgaagaaaaacacatctccctcacccagcgccggagcagtatcatcccacgcccagtggctatcgtagccaaggtgcatgaggcgcatgcaaaacgcccggcaagtaagcccctcacgcccaacaccagcacaaacaatgcgacgcgcagaccgcaaaacggggaggacttcattcaccgcctgatagtccagacgatcgaaagtctgcctcagctcggtcagaataccttccgcctgcgctgcgtcgactacacctttagataattcactcattgttagactccttggtcttgaccgaagtggaagcagtatccgccgcgactttcgcggtgcgccctgtccggtttgctcgcagttcaaacgcccggctcagcaccatgacaatcaccagagcagaaccccaagcaaggttcttgacgaacggggagaaattgagaatggtgaatccagtctgcagcacctgcaacatgatcactgccaacagcagattgccaaaccgaccacggccgccaaacgggtcaaagccggcaagcaccacgaccagaagagcctgcaacaggtacgtttcaccgaatccaacacgcgcggaattaactcgagcaaccatgaccatcgcagccaaacctacgaaaatgcctgccgcagcataagcgaggaccaacgttcggttgacgcgatgccccgagaacagcgatgccaccggattggaaccgtagaaatatagttcacgaccgtatctcgtgcggctggttatccagccaacaacgagatagcacaccaatccgatgaggaacaccactggtacgccggcgaccgtagaaatgcccagcatcgcgtaatccagcacgccaacaccaattgatgaaccgttggttgccgcagaagctattcccgtaaacaacagctgagtacccaacgtcgccacaatcggattgacgccggctaacgagacaaggagaccgttcaccatgccgcaaaccaccgttgcgacgatgcccagcaacaccgccacagcaattgagacccacgacgaaccgagacgacccatttcgtttcccgacaacatccacgcgatgataattgcggaaacgttcatattagcaaccaccgaaaggtcgatgccaccagtgagcatcacaatgcccatggcgagcgccagaaacatgaactcgccaatctggaatcccatggattgcaatgtaccgacgttgtacagcgtattgccaagcaggatataaaaccctaggcaaaccaccacaacggctccatagagcaccttgctggaacggtccacgccgctccaccacgtggcaatcgggttgctgcgagggctgcgccccgacttgcttttcgtttgctgtgccatgatgatcacctcagaccaggaaagacatgttacgacggttgcggcgcttttcgccgtaatagatgacgaccaccgccgcgaccataaccgcgccgatgaacaggttgttccacgaggattggatacccatgaacaccagagtgttgttcagcaactgcaccaaggcaacacctaggaacgtacccagcagggtgccataaccaccagtgattctggtacctccaataaccactgcagcaatcaccgtcagttcggtacccataatgctggtcggatcaacaaacttgaggttcgaaaaagagatgatagccatcagcgcagccagcacacccatgagcggatatatgaacaacttgatgtgcaatggcgataatcccgctcgccttgcagattcctcggaattgccaattgcataaacaccgtgtcccagtgtggtgtgattcatcacgaaccacactgccgcgtatacgatcaccgcgatgaggaagaagcccgcaatgccgttttcctgccctttgacggtgaaagaaatcacgttccatctaccaaagctcaacattgatttcggcatctgacttatcgtcaccggtttagtgcccaccaacgtagtcattagaccatagaaaatcgatgacgtaccaagcgtcacaatgaacgtgggcaattccagccaatggatgagcagcgcgttgacagtaccgagcaatgcgccaatgagcgctgcgacaaccacgatgaacagcatcgaatcaatacctgttcgcacggcaacgaccaccgacgtatagccagacataatcgccaccgccggaaacgacacatcaatgccacccgcaatcatgatcacatacacgccagccgcgagtatcgccataccggtgccgttgcgagttagatcggcaagcgtaccgagcgatagaaaattggggttaattacggaaacgataatcgcatatgccacgatgatgaccaacaaggtcttttccatggaattgaacttcttagccctgagcagcgggactttatcggcttgtcgtgtcatcaagccacctccttattggttgaatgagcagtcacatcgtctgctccaacaccattacggtcggcattacggtaaatggcggagaagcccggcttaagttgctcgccactgagctccgcggttactgcaccctgcacgaatatggcgatacggttgcacacggccaacaactcctcttcttcgtcggaaatcaccagaatggcaattccccgtgaagatagctgtcgaataatctcgtatatctgcgatttggatccgacatccacgcccacagtcggagagtcgagaataagcagcttcggtgcggtggccacccattttcccagtagcaccttctgttggttgccaccagacagagactgtgccagcagcgccaaatcacgggtgttgacttgtaggttcactaacgtgtcttcaccaactcggcgctcttgttttacatcgactacgccgaatttgctcgagattctttccagcacactggccgcactgttttgcagtagattacggtcaagaaacagaccttcatgatgcctgtcttcaggcaccaaggcaataccattggcaatggcttcacgagggttgcgaatagttacgggccgcccatcgatagctatgcttccgccggtcaacgcattgagaccgaagagagtaagagcagtttccgtacgccccgaccccaataagccgctcatgccaacaacttcgcctggctgcatcctcagtgtcacatcggacactttcgaagccttgacgtgcttcatgtcgagcaccggcgcggcatcggccacaatgtggttttcgggaacaccaaattccacgtcatgtccggtcatcaacgcagacaacttacggctgtccagctgtgaagcttgataggtgccaatcacttcgccagaacggaacaccgtgatccggtcagctacggagaacacctcatcgagcttgtgcgaaatgaaaataaccgacacccctgatgccttgagcgtgccgatggtacgcaacaaactatccacttcagtggaagtcagcgcggtggtcggctcgtccatgaagatgacctttgcgttcaacgccaaagctctagcaatggcgacctgctgcttagccgccatagataggtcctctacgcgagcgtccagatcgagatcagcaccgattcgtgccaatgctttacgcgacacatcctcggcatattgaggattgactaacgaccgatggtgatgaacatgctcaggcagacatatgttatcccgcacactcatagtgccaaacaatgagagatcctgatgaatcacagctatgcctagaccgattgcctgtcgagcggtcagattcccgtatggcgcaccgtccaccgtgatgactcccccattaggcgttaatacacctgaaagaatcttcacgatggtggatttaccggagccattctcaccggccagacagtgtacttcaccgccgacaatgtccacgttcacatgcttgagcgcttgcacaccgccaaagttcttggagatatccgtagcctgcaatcgcatgttcatcaccttgctttcttgatttactggtggttggccgagtagcgacggcaatttagaagggatacttgccgtccgcgtaatcgcccttcttcagcaccagaggagcgtcaccataaacctgatgacctttgacctcaacactgccgtagccatccgctttcagatcaaggcctgtcttgatggattcgcctttgaccttgtcataggccagttggagcgcagcatatcctgcatcggcaggacgccaagtctgcgcatactgcacccaaccctcatcgatgtaaggcatgtccaccgagggaataccaagggaggaaacgtagacattcttgttgttacgctccttgagcacagcggccatattggaaccagccgagacggaggtgccaaagaaaccggtgatatccgggtgagcgttgaggatttctgtagccaccttgcgcgcagtgtcatcgtcgttgttgtcctcatatggctcgtccgagacgaatgtgatgtccggatagtctttttcgagcatgctcttgcaggagttataccaagccatatgcgtctccatggtcttggatccgaccacagccgcaagtttgcccttgcctcccatgccttcagccagcggcttgcagaatgcttcgccaaagtccgtgttttggaaagcctcgatatcatagtcaacgtcatcggcgatattgctcgcttcatgagccactacgacaatgcccttggccttggcctgcttgattaccggcttgagcgcctgtggatcattcggaaccacaacaatagcgtccacgtcctgcgagatgaggtccgataccatttgcacctgttttgcggaatcgcctgaatccggcgcaatctgcttgacctcgaccttgccggtattgtcttttccgaactgctcaacaccggttcgcatgtcatcgaaccacgggatgccctcttgcttggctaccagcaccatcttgacggtatcaccgctcgacttgctgccgcctaccaatccacccgatccacaggctgctatgggtgcgaggcatgcgaccgcgagccctgccgctaacgttgttttcagtgtgttacgcatcttgtgtctcctttgatatgtagatgcttgtttctctgattgttcagttatgacttacgttgattgaggtcggtcgcaaccggccagatggttagacgtgcagatttctgctttacagctggattccgctcccatgacgccccacatcagctcgtgcctctgatcggagcatgaacctcgacgacatctcctggaagcgttccaaaataaacggcgcataatcgcagatgtaatcgctagacagatgtggggtccatactggcggctcggcaccaccctcatacacccatgccgcctggcgcgcggcaccgtccgccacgtattcgctgtattccggcacacatacaggcaatccgagcaccgatggggcaatgcgacgcactgcttcggactgggctccgcctccaatgaggttaaccttggtaaccggaataccgagctgctggaatgcacggattccgacgcccacaccacacagcatgccttcaatggcagctcgcgcaatgttcgaagtggtgagattttcgcaagtgatgccatgaatggagccagtggcatctggataattcggcgttctctctccttcaaagtacggcaccacaactagtccttcggcaccgggaggtgcgcataacgcggccctagagaattcagcatggctcatgttgagcaacgctcgaaacgtgtcgacaacgcgcgaggcgttcaacgtacacaccaacggcagatagtttccgctggcgtccgcgaaaccagtcacatatccttcaggatcatgcgtagcaacagccgacaccagcgacaccacgcccgacgtcccgatggatatagccacttctcccggcttgagaccgagtccaagcgccgcaccggcattatctccggcacctggcccgattacaagattgcgtccatcgattttcacttcagacacacgccgcgcaggtgaggcgacccaaggcaaccgcacacgatccgcaaattcggctcccgccgcaagctccaacaaatccttgcaatattcattatcttgcgcggagtagtaaccggtgcccgaagcatcagaacgatccgtgaccagtgtgttaatatcgttgccacctagtagatcccaagtaagccagtcatgtggtaacgccacagctgcggtacgagccaaattatcgggttcatgagtagccatccacctgatcttcgtcactgtcaacgaggcgacaggcacgctgcccgtccgatcagcccatcgacgtttgccttcgcgttcattaccgttgccgagttccgagataaggtccaccgcatcacgagcagatcgtgtgtcattccacagaatggcattgcggaccaccgcaccacgctcatccaacgcgaccataccgtgttgttggccagctatggatagtgcgaccacgtcgtccaaaccgccagcctggtgcacagcctcatcgaaagccgagcgccacacctgagggtcaatctccgttccgcgcctatgcctggccgcgcccgatctcactaatttgccggtatgcaaatcacgaatgacgactttgcaggattgcgttgatgaatcgacacctgccacgaattgctgcatggcccctcctcaacttcatcgttgggtttattgctttatgcaacatactaaagtagagaatatactttgtccattcttgcaacaaatcggcgtttcgccgcatagttatgaatatgtaatgacacaacaccagccataccgcgagatgtgaggcatacttgtatgtatgccctctcacacaattgcacccggccgcaacgtagccgccggcaccgctaccacactggatgccgccagcggcaccacagtgcgcaaccataacctcaccatgctcgccaatacagtcgtaaccggctcacgtcatccttcgcgggccgaccttgcccgcatgaccggactcaaccgctctaccatgactaggctggtagagcatctcatcagttgcggcattattcgagagctcaattcggaaagcaccgggtcaggccgccccgctgttcctctcgccccggccctacatacctatgcagcgattggcgtagatatctccacaggctctgtcgaggcttctgtagtcgacctatcaggcgaaattcttgcgcagcattatcagcaactcaatacctcaaacgccgagaaaacattaactgttgtgcgccgcatcattgatgatctgcgcatgagggcaacagatgccgagctcactacggtcggcatcaccgtagcgttgcacggactcatcgccaccaaccacacttatctgctgagcagccccaatcttggctggcacgacattgacctgctggaggaactgcgtaaagctgcgccacagaatatgttgccccaaatcaactttctcaactctgccgatgcaggtgcctatgcagaaacctatctgcgcaacaaacaggacattcccctatcggattatctctacgtctctggcgggactggtatcgacgctgcaatcgtcaaatgcggcggattcgacacaggatgtcacggctgggcaggagaacttggccatgtctacgtagctgaaggcagacgccaatgctcgtgcggcaatactgggtgtctagaaacgtttgccggacaatacgctctgatggaggccagcggtctggcaccacactcttctaccggcaacttgtttgccgcactgtctcgcaaggagccagacgcctgtaaagccatgaaatcagccgcacactatctcggcattgcattagcctcgtttatcaacatatgcgacattcccaccattgtgcttgatggactatatgcacagctatttgaatatctggataagccactacagcgtatgctcaccgagcacacgctttcctcgcaatgggcagatatcaaagtactgcgatccgtttccaccagcaattccgtggcatttggagcagcatggaaggggctcatcgaatttctctccacaccggatcgctggcaaaagcagaatgatgaacaacttggatacttccccattacagatacgccgtcagtgacaatctgagagggcgcgaacttcagcgaatacttcatcagccattacagcagcggttcttggcaatcgttctcccgctttcccaagcacaatggatatgtgaaacatcgtcgttttactgcactattccttgtgccgctcctcactttggcaaccgcctgcggcgcaaaccagtctgcgcagaccacggaatcacagccgcagcaacaaaccaacacactcaaaagcaacaggacaagtcgggttccgactcggcaaaaaccaccgtagccgatccgacccaaggcaattggactgagacgtattcctcacccaccgatttggacggcgagctggataaggcatggctgaaatgtgcgccgcagaacaatcccgatccggaagcattcgcgtggaaacgctccaccgatcacagcaaagtatggctgcacgccaccgaagggcaaatggatggcgcaacacaacgctcatgcatggccgacgaactcgacattccagacgtcaccgaactcaccacttcctggacgaagacagcactgggtgattacgcccggattcaacgtcagagcaacaacagtattgacatagtctggcagtacagtaacgccgtcacggcatcgctcagcgcacaaaccgattcctaccgcgtcacattgccctattcctggcataacgaagtcagcatttccgtggacggcaacacgattaccgtcacggacaaagagcacccaaactactcgctatgcacgttcaaggtctccaagacaccaacgcaggagatatcggcaatagcctcatcgagagataccaaatcggcgatacacccgtgcagctgtgggccacacgatgagcattcggcgccgtcaccgaccctgcatctatatccgccgaggacgcagaggacgttaccgaactgcaaactggagacaccattgattatgaatcgccgatcagccaaatccagtccggtgactattccggattgttcaccatcgacgagttcctcaaggcgcacattaccgtcagtagtctttcgtgatttgcgcatgactgaacgatgattcgagccagaaacatcaagaaacatgtcatactggatatgtccacataaaataaatgccagaggaagcaccaagccttgccaaactccactcccctcatttccatcatcgtgccggtgtataacgccgaagactacctgcattactgcattgattcgatcctgcagcagtcgtacacgaaccttgaggtgattctggtggatgatggagccaaggattccagccccgcaatctgcgatgagtacgctgcgcaggacagccgcatcactgtgattcatcaggagaacggcggcattgccaaagcccagaatgctggactagacgccgcgcatggcgaatacatcgcgtttgccgacaacgacgacatcctcgaccgccgcaatatcgaatacctactgcacgcgttgcaaaacaccggcgcggatatgagcaaggcacgctggcgtcagttcggcgtctcccagctgggcgaggtgtccaaagaggccgagacgggcgcgcaggcgcccggcaaaatcactgtgttcgagcacccgctcgccgcctaccagaccgtgttctgcaaaagcctgcgactgctcggcagcaagctcggccgcaacaccgaggcccgctacttcaacgaggcgaactggtgccgcctgtacaagcgcgagctgtgggacggcctgcggttccccgagggccattacgcgcaggatatccgcatggcaggccccctgtacgcccgcatgggcaaagtggccgacatcgattgcgtgctctattactggcttcaggagcccgactcggtgacgcactcgaagcgaaccgccgcattctggcatgacaacgtgctttccgcagccgagaacttccagttcactctggaacagggcatcaccccgtgccggaactacttcggcctgaccgccagcgtgcgcgatgaaggcaaaggcctcaaggcgctcggctccgaagaactacatgacagcgactggcagaaccatctcgatgacgtggccaccatgcgcgccctgatcagcaagctgagcatcggcgaacgcctgaaatgcacggtacttgccacgattcgctcctgcgaaaatgtcgtatacgataaccgcatccactcgatgaagtagaaaagtcactgagcccagcaaaccctcgccttcagtgggctagagcgggctgccttccattcctattgtcaactacgactagtcccaacaggaataccggcaatatcgggagcgcataacggccttggattccctcaaagacctcaaacctactcatagacgccaggtcattccaggtaagccccacgaagagcacaaacgctgctatctcagcagccgctattacgagacctaagaccaggaatcgatgtcttcctgcccatgaggccagtgtcacctgacccgtccagtgctgcttcaccgtataggccactgctaccaaccagaccaaccccaaaacggccgccgtggcgacataccaagtcggcagataagcaaaagtcccgaggaacagcatggaatgcactattttgccaatagtgagtatcggatgcgacaatgcaacactcacattatgtgatacgtccacctgcgccaacgaactaccgaacagtacgctccacggaagatacagcgctcctgtcagaaccgccgcaatccccacaaattctagcttgcggcgcacagtcatcaccgcagaaggtaggaacagcacagcaaccgccacaaacgcatagggaagtttttcacacgccaaggcccacgccagcacccccaaaaccgcagtgtgcggaagagaaatcaaacgtttgccctcagcagccgccgcaatagccgccaccatgcaagccgaaagtgccacaatcatgccatcaatcatcaggctcgatgccacaaacgccaccggtggaataactaatagcaacgccatcagcgatttccaacgcggtaacagcgcaatggcaaagcaccccataatcgcatacagaatgctgttggatattcgtgccgcctgccactgcgcgtacggtggcaaattcaccagcatggcgattttcaggccaatggcttggggcaagtaatcaagcggaaaatacgcgttagagcgattggtgtgtgtcccatccggcacaacgatgtgatcagccatcacatcatcagcactttgctgcgtttcccgcgacgagtcgccctgcgtcgccctactgattgactcaacaatcagaacgttcgcgaatcctggaatcgtcagcaaacgcgaatcaccctcaatggactgttgcttgacggtgttgccgtgcgcatcctttccctttgcaacaggattcaacgattgtcctgtggccaatgcgtacgtggacaacggatgcatatcaggatctggaatagtaagagggccaacctggacgatgaacatacaggcctgcagcgcgaacaacaccaggaagataaaaatattgcacgcagtccccttcaagacatgtgccacatgcttcataacgccctaccttccggtcattcgtccacagtctaccgcacacgcacaccgcaagggcctaccaatacctggtcaatcccaacataattcgccacagcacatttagggatgactttatcttgggcttcttattacaatgctcaagtacgttgtttatagaaatgagcgagcagagtggacgacatccaaaacgatcaggagccttcagcgcaagagtctggcacggatatggaaaaacccgaagtcccagctgttccctcaaaacagaatgacgatcagcagagcaacaaattgccgctgcctttcgcgttgaactttagcatattgatggcttcaaagcccatggccatgctggccaaagccatatctttcttgcgcacactattgaagaagcgcccccgctgcccctacacgttgtacgtagtggtcatggtaatggttgacgccgcagcagtgctgttcatccaatggagcatgtacgaggaacccacatatgccgatccggatgcagtagatgacaccaccaaaatgttcaatagcgcggctgggcagctgacgaaattcgttgcccagatgtggatggaacacaactacgtctggctgctcaacttcctagtactaggcatggtatacctcgtactgatatttgtcttgaaccggttctgggtggcaacagcggtatttgccatcatcacgtcaacctacgctgtggcgaatagcattaaggtcgatctgcgcaacgaacccatcattccttctgatttgggattcctctccagcggcaacggtggggaaatcacatcattcatccctaaagacagtcagccactggtcgacggcaccattaccatgcttatctggctgactattatctgcttggcattgcagcttatcgatggccgccgctgcgtgattccatttcactggtggcgcccactccgcaataccaagaccatcatcggcaattgcacacgcatcattgccgcggtactcagctttactctgctctggtcgttcacttggaatctgggagtcaacggctcatggtcttacaagtgggcaaagagtctaggcgatgatcccctgctatggagcacagttgtcgacgccacctataacggcccaaccatggactttctgcggctggcacacgcaaaaaccatggataagcccaaggattacaacaaagagaccatggaagctttggctaaacgttataaggaaagcgcccaagccactaacgaggcacgtgccaataacctcaccgacagtaccgtagtcatgattctttcggaatcattctccgacccaactcgcgcgccgggagttgaactcactgaagatccgatgccgaatattcacgcccttgaaggcactaccacttcaggactgatgctctcgccgggcatcggtggaggcacagccaatatcgaacatcaggcattaacaggccttagcctggcgttgttcgacaattccatgcaatcgccttatcaggagcttgtcccgcaccagaaaacaccttatacgttcaaccaaatatggaatgatgcttacggcaagaatggttccgtggcgttccacccatacttcaagaacatgtatctgcgcgatagcaactacaagaaatttggtttcagcaagttgtattcgcttgatagcaaacctcccatcacacatcaagatcacatcgatagttctccctatgtgagcgatgccgcctcgtaccagaacgttcttgattcaatcaacagcaatgatcacacccagttcatccagctggttaccatgcagaatcatgcgccctacaatgatttctacgcggacaaccagttcaaagaagccgatgtttcccaactctccgacgaagagaaacagtctatcgataattacgccaagggcatcagcctcactgatcaggagactgcggactttttgaaccagctcaatgcagttgataagccagtcaccgttatcttctacggcgatcatctgcccggcatctacagcaccgcgaccaaagacaagaacaatactcttgtcatgcatgagaccgattactttatatggtcaaatcaggcgtccgcgtctgccggtgtcaaactcgacccgcagaccgccggctatgtctcatcgaactctttcatggctttggctgctgaacatatgaatgccaaggtgtcaccttatctggaaatgctgacgcaggtgcaagcgcagattccggcaatcagccgactgatcagctccaacgattcctggggcgatggcagcaccgcctatctggatgctgaaggaaaccgcgtcaagcgtaaggatctctccaaggaagccaatcaactactaaatgattaccgtctcgtgcaatacgacatgagtaagggtaagggctaccttaacgacgatggattctttgcagttaagtaagcaaaaggggcatcagacggttgtccaatgccccacgaatcgcttacttctctcgaacccaatagttgcctgatgtacgagacaggtttggattgtaatacggatcgttatctacgatttcggcatacttcttacggaatttcgcagattcccgatctagtcgagccttctttttcttgctttcaatatcgtatccacgcgtgacggactcgtagtggtatagctccgcctcatgcgcccacacgatgtcacgtccaagctgttcgtgaatccgaatgcacaagtcgacatcgttatatgcaaccgccaaagcctcatcaaagccatgtaccgcacagaagtcatcagctttcaccatgcagcatgctgccgtgacggcagagtaattgacgctctcgacgagtcggccaaagtagccaaaatctccacgggggaagccaacctgaatatgcccagcagccccgccgaggccgagcacgatacctgcatgctgaatggtctcagtgggatagtacagctttgctcccacgacgccgattcgatccagctgcgcgaacgacaccattctggtcatccaagatgggctgatgacttcagtatcgtcgttgaggaacagcaagtaacgaccggaagctttttgagcagctatattgttaatccgcgagaagttgaacggaatgtcaatctcttccacacggaaacgatcaccaagcttcttggcaaaacgctgatacaaatcctgcatatgcgggttgtcactgccgttatcagcaatgatgatctcataattggggtagtccgtcttgtcaataattgagctgacacaacgttcgatattgtcgtacccgttcttcgtcgggatgattaccgacactagctcgtcgccggagacatcgtaatgcacgttataaatgccattcggaccggcggaaaccacttcagcctgaataccgcgtctgtcaaccgccgactgcaatgcgcgcaaaccagcgtcggatgtgtagctcttggcaccgccgctagacgcggtagaagttgccaaagtgcgccaatgatagagcaccttcgcgatgtgctggatgtgatcaggagtggttttttctacgaagcgaagcaccagatcatagtcctgcgagccctcatagccgacccggaaaccaccgatttcatctacgatgctctttcgatacacaccgaaatgactgatgtagttagtactcatcagcaaatcgggagaatagttcggcttgaaatgcgggtcgaagcggttcccctcttcgtcctctttgtcttcgtcactgtagataagatctgtgtccggatgctcattgagggtcttcactacctcaaacagtgcctggggagccagttcatcgtcattgtcaagcaaaccgacgaactctcctgaggcctcttccaaagccgaattcgttgctctggaaatgtgcccgttttcagggcggaacaccactttgatgcgagaatcctgctgtgcataccgttcaagcagcggacgcacatgcggctcggacgaatgatcatcagccaggcacaactcccagttggggtatgactggttacgaaccgaatccacacacttttccagccacttcggctccacgttatataccggcaccagcagtgaaatcaacggctgatatgcaaacaaggaaatctcattgcgcactgccgtctcgtcgtagcgctctgttcgacgaatgaggttatggtacacgtgcttctgccaacgagggccccaatacttatccagcagacgcctcgtggtacgacgcggatgtcccagtagtgcaaccttgcgcaggaagttcgacaatcccgcaagaacaggcgacgactgaaccgggatgacgacttcctgactatctgtggaggtcctcatacgcagacgcagcttgtcgttcgccaattgcttgcgtccacccggcaccgatatttctgcacggaaaccaagaatagaatctgggggaaccgtagttattgcattcacgtcaggacgaccgtaacggctcaggctgcgcaaactcgccacaggagattccgccaaagagatatcaacctgttcaccaccgtgtatatcggcagcccatccgttgacgagcacagtggatccgtcttgcttagcatccacttgatcaaggttgtatacaatgccccgctgttcctcggaagcaggcgggaagcatgcagccgcaaacggatcaacgatctcgcgatgcatcttcagatattctgcaatgtcatccttattgattgacaagtgagtacgcttgcaatccgtgaaaaccgaatacggctcccaaagcacagtatgaccggactgctgatacatgcgagcgcaatagtcaataccgcgcagtccctctgccaggcgcgtattgagtccgcctatttccacgaattccttgcgacgcaccagcatgcaatcttccgtggccgcgaacatgtcacgaggaagcagatctctgaagtagtaaccgattccttcatcccaggaaccgcgcatttcaaaaggctcacattgcttcaacgcccgaagagtgacgcccacattgagcacacgcttcttggtatcaaacaccttaccgcccacaacgccaacagaagagggacgcgcataattcaccatttcgcgtagccatgtgccatcggtcggcttcatgccgttcaacagcacaatcacatcttcagaacgacgttttgccacatcattgacggaatccgctgcagcagcaatcacagtgaacgacggataatccgtcatctctcgtagctgcttcacttgcgcatcagacagagaagaagcaaccaccgcaactgtcggagtgtaatcggcatagtcaatcttatacgtaccgagattgtcgagcattcgcacgtcaccggctattcctcgacgctccaaggccgcttcgatcgccttgcgaccagcctcataggcatacatcttgcttcgggggtctccggccacggagcttgcaagggtgcgccagtggtacagcatctgcggaatatgatgaacgtgatgtgcatgctcggtggcacgcagcacgaagtcataatcctggctgccgtcgtattcgctgcgcaatgcgccaaccttgtccaacagcgcacggctcactacgacgaaatgagtgatgtagttatgaccgagcaataggtttggcgaataatccggcttgaagaacgggtcaaagcgcttgccctgctcgttaatcttgtcttcatcggaatacacgaaatccgtatcgggctggtcattcaacgctcggacgacttcaaacaacgcctgcggtgccagttcatcgtcattgtccatgaagccgacgtaatcaccagtagcgagttctatggcagaattcgtcgccgccgcaatacgtccgttgctgtcacgaaagacaatcttgatacggggatcgctcgcggcaagctcttccagcagcggcttgacgtgcgcagaaggcgaatggtcatcagccaggcacaattcccagttggtgtaccactggttttgcatggattcaacgcatttgcgcagccagacctcgtccacgttgtacacaggtgtcaccacagagatgagcggagtcttggaaaatgcggcaatgacgggctcagcttcctgctgagtcatcgtttcatgacgctgaatccaggaatcgtaaaaatccgtctcaccaacaacacgacgccttaccgcgtctcgcaaatccttcatcgcctcgcgattgccaaggtgcgcggcataaaacatgagcctgtgcacgcgggtgctgatgtattgcatgcggaatcgactcatcaaacgctgaacattgatgtgccttgtcatggtcgtgccaggcgcctgacacatcaagtcgaaattctgcactccctgaggaataacaatcgtgaagcctgcttgatcgctgggatccaatccatacgtcttttccagatcaacacgagtattccgcgataccgtcatacccgtgccggctacagccagtggtagggcggtctgcctcatcttgtcaaccgcccagccggtcactatagtccgagactgttccccaaccttgacgttctctactttttcgactgttacctgatatgtacgatcattcaacagcgtcagcatgcttgttctgtccttatcatctcagcagacggattaatcgattgtcacttgcaccgtattgtccgggttcaccactgacatcacttccgcagcggatcccttgatgtggaatctgcaggcattctctgccaactgcaaacgctcagagtccgtctgcagagcaatacagatgcggaaatcgccaaatgcgagcacattcttcaccgcaaattcggccgtatgcttaccggctgaaatcttatcgtcctcgaagccaaacggcatggaaagcacgggaacattgcggccatcaaacacatcgatgaacagctggttcgcaggaaccggacgatcgcattcgaagtcaacattcatggtgaagtcctcgcgcgtatccaggaatttctgcgtctcgccatcgacggcaacgtttacggcattcacggtcacggcattgcgaatagccgcttccttttgccgtgcctccactacttcgcgcgggggaaggaacgaatccgagtaagcatcggcaatctcgtcagggtcgccgatcttcgcaatatagccgtcctgaatgagcattgcccgatcgcaatacctgcgcacatccggcatggagtgggtgaccagaataaccgtcttcttgttgcgcttcgcctcaaagaaatagttctggcacttcttctggaaagcttcatcgcccacggcaagcacctcatcaagaacgaggatgtcgccctgcgatttaattgccacagagaatgccagacgcacttgcataccgctggagtagttcttcagcttctgttccatgaagtcgccgagttcggcgaactccacgatgtcgtcatacatggcatcaatctcgtcgttggagaaaccaagcatggcaccattgagatatacgttctcgcggccagtcagttcaggattgaatccaacacccaactcaataaagggcacgagtttgccgtccacctcgattgtgcctgtattcggcgtgtaaatctgggaaatcagtttcagcagagtggatttaccagagccgttcttaccgacaatgccgaaaaactcaccttgtttgatatcaaaggtgatgtctttcagcacttcctgcgtacggtacccgcgaatgccacggagccaattgaacagcatgttcttcaggctgccagcacgttcaaccggaagtttgaagttcttggatacgtgctccaccttgagcgccaccggtcggtcagcgttcttctgctccatcgctttgtccatcttgttcatcgtcacaccaactccgcgaagtactgggatttaacggtgaaatacttcaaaccacccaagaagatcagtacagaaagaataatcggccagcactgcaggaatgggttatccacccactgccaaatggtctgatttgcagggctaatcatcacatgacgcgcatcctgaacgatttgcgccactgggttgagaatcagatcgagccgggcaaatatcggaccatattcgcccgcctttgaagtgataagggaaatagggtagataataggcgtggcatagaatccagcctgcattaccacttcccagatggggttcaagtcacgcagattgacatacacggcactgaggaagaaagcgattcccaacgacagcatatacaactcaagcaccagaggaaccatcagcaaccacgaccaggtaagactgacgccgttaatcagagcaaataccaccaccacaacaaagttgatgccgaagttaatcatggcgctcatggatgaggcaatgacaatcacatacttcgagaagtgaatcttgcgcagcagatcaccatgccccacaatcgacatcatgccgccggtagtggtttcgttgaagaaattccacatgatgatgcccagcaaaagcgccacggagaagtgaggcacatcagcaccgaacttcaggaaccggacgaacacgagatacatgatggtgaacagcatcagtggcttgagcacagaccagatgtatcccaagaaggattgctggtaacgaagtttgaagtcggtgctaaccatcgccttcagtaataggcggttcttcctggtgaagatttccgtgatgttcaaaattgctcctcaaatacaacaaacccgcatattttatcagcgcggactaacaatctatgcgggttttcagtgaaggtctatcgatccatcggtttgacgatgaacttattatccgccacatccttcagatgcttgccatacgggctcttgccatacttcacagcggcctccatcagctcatcacgagtaatccaaccgttctcaaaagcgatttcttcggcaacggcgatcggcaggccctgagcacgctgcacggtgcgcacgaattcgcctgcctcatacagggagtccatggtgccggtatccagccaggcatagccgcggccaagcgtctgcacattgagggtgccgtcttccagatacatcttgttcagatcggtaatctccagctcgccacggggggacggcttgacctgcttggcgaactcggtgacgcgttcgtcgtagaagtacaggccggtcaccgcataattgctggccgggtgctccggcttctcaacgatggaaatggccttcttgttctcatcgaattcgaccacgccgtatcgctcaggatcgtcgacgtagtagccgaacactgtggcaccatgttccaccgtggcggccttgcgcagcgtcctgcccaaaccgttgccgtagaagatgttgtcgccgagcaccagcgcgcacggctcaccatcgatgaactcctcgccgaggatgaatgcctgggccaggccatccggggaaggctgcaccttgtaagagaagctcacgccatactgggagccgtctcccaacaaacgttcgaagttcggcagatccttcggcgtggagatgatcagaatgtcacggatgcccgccatcatcagcacgctcaacgggtagtagatcatcggcttgtcatacacgggaagcagctgcttcgaggtcaccgtggtcagagggtacagtctcgtgcccgaacctccagcgagaataatgcctttcacgaaaaacctgctttccacaacgttttactcgttattcgtctacaaacatattcagcttagctaactcttattcaaaatgaaaaaccgcgcagagagcctgcgcggttttatcacttgaagtcaactgttatggaacagctatcagccgagttccttctgcacgtagatcttgagggtctcttcccagtcggcgggcacgtatccggcttcaccgatcttggcaagatccagtgcggagttgaccggacgcggagataccgggttggtcgcgttcgcgaagtactcggcggtgctgatgggcttgactttgctgccgttgccgttcgtcaggtcgaacacctcggccgcgatatcagcccaggacttcactgcgccggacccggtcaagttgtaggtgccgtagggggcgtggctgtcgagcaggtggaaaatcgcctcggccatgtccttggtgaaggtcaggcgaccgtactggtcatccaccacggtgacctgttccagcttgtcggccgggtcggcgaccttgttggacagcatcatcatggtcttcacgaagttgtgcccctcgccgatcacccagctggaacgcaggatgtaatgctcgggtgcgttggccacggcgatgtcgcccgcagccttggtctggccgtacacaccgagcggggcgaacgcctccgtctccgtgtgttccttggcggtgccgtcgaacacataatccgaactcacgtgcacgagggtgatgtggtggtccttggccaccttggccagcagagccggaccctgggcattcgccttccacgcgatcggacggccttcagcggtctcggccttgtcgacggccgtgtaggcaccggcgttgatgatcgtgccgtacaggctccaatcgtatgcctcgtatgccttcgggtcggagaagtcgaactcgtcgatgtccgtgtactcgaagccctccagaccatgcgcttccgcgtaggcgcgaatcgcgtggcccagctggccgttgcagcccgtcaccagggtgcgcttgggagccatgggcttggcgtccttgagcatcggatggtgcagatcggcctcgctgcgttcggactcctccagcggaatcggccactggatgttcagttccggatccgcaaggttcacgaacgtgtaggtcttcttctgttcgagcgaccagtgcgcgttcaccagatacgtgtacaccgtgccgtcctgcagtgcctggaagctgttgcccacgccgcgaggcacgtagattgccttggacggatccaaacgggtcgtgtacacctggccgaagctctcgcccgggcgcaggtcaacccatgcgccgaagatctcgccggcagcgatgctgatgtacttgtcccacggctccgcgtgaatgccacgggtgacgcccttggtggcgttgtagctgatgttgttctgcaccgggccgaagtccggcagacccagacccatcatcttggcgcgctgccagttttccttgaaccagccacggttgtcgccatgcaccggcaggtcgaacaccagaaggcccgggatgttcgtcttctcgaccttcagttccttctcgaattcaaatgccatgatcggatcactgtccctgctgcttgtacttggcttcggtggcggccttggccggctcccaccaggcacggttgtccgtgtaccacttgatggtctgctccaggcccttctggaagtccgtgtgcgtcggcttccagccgagctcggtccgcagcttggtggagtcgatcgcgtagcggcggtcgtggccgggacggtccttcacccagtcgaacgcgtccggatcctggcccatcacggtcaggatgtcgcgcagcacggtgatgttgttgcgttccccgttcgcgccgatcaggtaggtctcgcccagacggcccttggtcaggatggtccacacgccggtggagtggtcgtccgtatggatccagtcgcgcacgttctccccgttgccgtacagcttcgggcgcaggccctcaaggatgttcgtgatctggcgcgggatgaacttctccacatgctggaaggggccgtagttgttcgagcagttgctgatcgtggcgcggatgccgaacgtgcggtgccatgcgcgcaccagcaggtcggagctcgccttcgtcgagctgtacgggctggacggatggtacggggtccgctccgtgaacttggccggatcgtccaaagccaggtcgccgtacacctcgtccgtgctcacgtggtggtagcgcacgtcgtacttgcgggccgcctccaagaggcggaacgtgccctccacgttcgtcttcaggaacggctccgggttcgcgatcgagttgtcgttgtgggattccgcggcgtagtgcacgatcgcgtcatgacccggaacgatcttgtcgagcagctcggcgtcgcagatgttgccgtgcacgaactccacacggtcgcccaggatgcccctgatgttctccaggttgcccgcatacgtcaacgcgtccaaaaccgtcacatgcacgtccggatggttgttgtacacgtaatggacgaaattcgaaccgatgaaaccacagccaccggtcacaatgatgttatggggagtaaacagttcttcagccataacctacagcataccgtcaggcataccgagacggcgagaaaagacattgttactggtgctgaacaatccgatatggggttcgcccattaatcgtttcgccaatgcgctcgaacgaatacccattgaactgcatcgcatccagtttctgcggagaaagcacattgctcacacctagcttgcgcaattgctccggcgtgacatgcacggtaaacgaatcaggcgcgactaatgtgaacacatcggccgactcctgttccacgacattcacagaaacaaatgcataccgattgtagatttcttcccattgtccattgggatcaagcttcttccatgtggcaagatcaggagtgacttccaacgcattcaatgtgtttattccatttgccactgcaagattcgccagctgagagccgaatgcatcatctattgcccacattcctggattctcagattgcagcgactgcacttgttgtatcagcggctgcttagtcacgggcgcactcccatactgcacaggattcacagacaaacctgataccaacagcccaacggacacaattggcgccacaactgtgcgagcaattacgccgttattcagaacagcgaaactgagcaaacccgctatggcaaaacacaccacgaccagcagccgcccaatgtacgagagatacatcgcatgattagcccatgccaatatcgcggcaaacacaaaagtcaccagtaatgactgcttccaagaaagttcgccatcgataatggccgccgcacgcaccaacactgcgatattcgcaacgcccaaaaccaccacgcatcggccgctagtcacagaagtcaacatcattatcttagaaagccaaagcggcatacccacgcaggcaaatattgagaacaacgctatgactgtaataagccaggcactaagcacatccacttttttgcgctttatcatgccgaatacggcaagaattattccgagcgggaatagatctacgaaacgtgatgcctcaaccatatttgttgttacagagtcaacgacataatccttgaacgggaaaaagagagtgcccacggatgatatcagcgacagagggggcagccctcctccgatggattgccttgcgcccggatatgccgtgtgcagcatggattgaatcgtgccccacgaagtcaccactgcagagccaagaatcacacagaataaggcaatttcgcccacaaaaatcagggcgtctttctgtgaaattcgaatatgtccccaatgccgtatgacaatacaaagaatcagcaccgcaagaagataacccagagagatttgccatgcgggatacaaggtcagtgcaaacatcccggcgcatatcagaatcactgcggcatatgcggccctatggccagactcggtatcgccaagatatcgatcaaagcacacgatggacacgaatattgcgataagcatctcaggcagtgcgttgactgcgaaccaccattgcaccaacggggcacatgcaatgaggattgcaccaacgaacgctgcacccttgtgtttctcctgccggcgatcattgctgatgcagaggaagaactcatatgcggccaagaaaagtaccactaggcgcgcagaccaataaaaagcaagtcctcggctactgccgaagaggatatacccccaatggaacggcctaaacaactcggcaagagccagcacaggtgcatccttgacgatgaacatgtccgccggtttattgccaaacaaatcattaaagtagctatacccggagtagctttgcgaaaaagccagaggagtgcccaccacatattcgtcggttcgtattatgcgaggggttccccataccacgtccgtagacatgtcatgtcccagccagtaattccacatgcctatggatgagccgctaatattcaacagcacgcaagccgctatgacacttgctccgagtatgaagcgatggcggtgcatccacatacccaccggcttcacgccaaaagcaatcatggcgccaatcaccagcagaggcatcaatatcagcaggaaccggatgcacagcaccggaacagactccgttgaagcaacaggagccagccgaaacagacgttcgcgaatgcttggatacgccgacataaccatgcttgacgccactgctgcgcatatgaataccgctatcaggcggataagaaaacctcgggcagcaagaggtgatggcttagagtaacgcgtcccttgcagtcgctttgttgccaaaatacttccttaagtgtcgcacacgggtactggccaacaagtatagtaaccaccatgttcgagaataatcagccttccgttgcggtgcttcttccttgttttaacgaggaggtcacgatcggcaaggtggtgcgcgacttcaaggccgcgctgccggatgctacggtctacgtgtacgacaacaactccaccgaccgcaccgccgagatcgccgcagccgagggcgccatcgttcgccgcgagccccgccagggcaagggcaacgtgatccgggccatgttcgaggacatcgacgcggacgtgtacgtcatggccgacggcgacgacacctacccggccgacgcggcacccgccatggtgtccaaggtgctcgacggctacgacatggtcatcggcgaccggctctcctccacctacttccaagagaacaagcggcccttccacaacttcggcaaccggctggtccgcggttccatcaacggcctgttcaatgcgcatgtcaccgacatcatgaccggataccgggcgttcagcttcacgttcgtcaagacctatcccgtgctctcgcgcggcttcgaagtcgagaccgagatgaccatccactcgctgaacaacaacctacggctctacgagatgcccatccagtaccgggaccggcccgccggatcagtatccaagctcgacaccgtgggcgacggtatcaaggtcatgagcaccatattccgcatgatccgcgaatacaagcccctgcccttcttcggcaccatcggccttctcatcggcgccatcggcatcctgctgtgcgggggggtcacctacgagttcaccaagaccgggctcgtggcccgcttccccacgctcatcggcgccatcatgctcgtcatcgtcggtctgctgctatttgttactgggataatccttgacgtcatcgcgaagaacaatcgcaagaccttcatcattgacaccaatcagtttgcatacctcaagcgtcactgagtaacaatgcagcaaaaatagtaatcctgttcaggaataatcagctccgccaggcgatgccctcttttgtccatccctgtgagccgcgaatattatattcgttgcgatttgatgtatagaagtgttcgtagttggatccgttatacaaacggtaaacagctgtacccccattagggttgctgtaccaagcgacaccttcatatatccatccgcgttgcttgctgagcacattcctctcatgctgagaaagagtgaaaacgtgctgtttaatacccggatgatagagacggtacacaggctgtccggaagtaggggtcttgaacatgattccctcatacacccatccacgctggttcacgagcactgacatttcatgcgcgtcagcagtgtagtgatgcacacgaataccaggatgatacaaacggtatacagatccagtagccccaaccggagcggttgaagtcttattgccgaacgcactcagatccacggtgccgctaatgccattcacacggcccttgctggtgtactgccaaccgcgatcattggtggggaatgcagtgtaccccattgaagaaccgtactgcgctacccagcgggtcttggagtgaatattgctgctgttgagttctttgttcaaataagaggtgtacgagtatacggcaagattggtgtatccagcagacttcaacttgctgtaccaagcattgacgataccgttgtacgttccaggattgttcggtacctcatggcctgcccatgtccacttttccaagtcgtaatacaccggatagcccaaatcgcttgagctcacaccggctttctgcagcaggttcactaaactggaaccctcagcagcaccggtattggcgtcataagcgtacgaatagaggtatacgccaaacggaatacccaaacgcctgcactcgctgatattgcgaagtgcctgcttgtcaaacccgttgtcccacccgtagccaatgcgaatgattgcgccttccacgcctgagtttttcacggcctgccagttgatattgccctgccaggcagaaacatcaatcacacctttggcctgctggacaaacagattgtttgacgcgtcgaaaaacgctgcggtaccgttgtaggagccccagtgagcgccatattcattgttctgcaatgcggcaagtcgcactgaacccttggtagtggccttggccgcaccattcgtagcagttgcactgtccgaagcgttacctatggcttcgtcggaatcagaagtactcgcagaatccgacggggcggaggaatcggactgattgggctgttcagactcactcgaatcattaggccggggctgctcgggctgagtatcaggcgtgtctggggcggtctgcgcatcagccgctcccgcattcgcgtcgccgccgttggccgcaaccttctgtttgacctcatcggcttgcaccggaataaacgattcaccgtcagtcttggcaagcggatcaggctgagaatcctgcgtacccacaagcgcaggatcagtcacggtctcaccggtggtgatgttcttcagttcgccgtcggcggtaacggcatgatcttcggagaccacagttgcatcgtcagggatcgcagcagaaacctgatccggcaaggcagcgtccgggttatccggcatggcatcagcagcggtgtcatcggagattttctgtgtcctgaacggatccgtcgacgcatctgcaagcgcgtccacgctcacatcgctcaatgcactagccggtgctgcgcacaccgcacttaccagcgtcattgacgcaagtaccgcaaccgcactcatcattctcttcgctgacatcagcgtcccttaccgtttcttattttcgcaccgagtatttagacattcataccagcaatgctctatttgcgtccagcaagcacttcgcttgcccgcacaccacaatcaagccaccaccatacccggcacgttgcataaaacagaaccagtgaccttgcctcaacaaattgcacgcaacttttcccgcaatcgttacgattcgagcgtggcaagcaaagcacggtgagtcggaacctgaggtttgccatgcaagctgtcaatagtgttaataagtgttagtaggtcacaccgcagtaggtcacttcgatgtaccggttgttcataccaatgaactggccagtcacagaactgcggattgctccggtctcaggatcgatgatgccgccggtctgggcgtcaatcagggtaccgtcagcctgggtgatcacgccgatcttttcgttgtaggtggaactgtcggtgacagttccgtcagcggtagcgccgtcagcagtggtgccatcagcggtcgtaccgtccgtagtggtagtgccatcaacggtggccgctgtctcggccttatccaccagcggctgccccttgcgcaacttctcccacacggcatctgcaccgtcggccagctggctgcggttgggatcttccacccacggggtaatcggaatcgtcatggaataaaggttatccatgctgaagttcttcaagctagtagccagaccagccaatgtaccaacattggccaggccttcgctcatctgcaccgagtccagcgccgactttgccagctgatacagctcgctcgtctgtgtgaagtaattcttagacagtgccgttttcaccagctgcctgatcagatactgctgtctcgtggtacgcatggtgtccgaaccgtccgtacccgtgccgtggcgcatacgtgcatactgcgtcgccaagccaccgtccaggtgctgcatgcccggagaaagattcaatccggtgtagacatccgtcatctgcgtagggatgcagatatccacacctccgatggcgttaatcatgttgaccagcccaccaaaatcaaccaccatgaagttctggatatccaagccgctcaggtggttcacctcattcagggtgcagctggcggccgaggccacgtcgccaccctgcgagtagccattggcaaagatggagttgaacattaccgacgactgcgcggcgatctcgccgttagtggtctggcaacccggcgtggagaccatgagatcgcgcggtatcgacaccagattcatgctcttacggtccgcggcgatctgcagaatcatcgtggtatcggaattatgcagattctcgacatcgctgccgctaccgccgattacggcattacccgcaccatcacgcgtatcctgaccaatcaacagaatgttgattaccttattggcatacggatccaccggtgagtcatctactttcttggcacccttctgctggatgacctgcaccttctggctgctgaccgcgccagacacatcggcccaagtggcagcggcgaacgttcccacaaacaccagcacggcaataacagccatggacacggctgcagcggccttgcggctcgtccggtatgccatgatgtgatgggggccgcgcaccttctgccaaccaaaattgggcagattgttctgtgcgtgccggttcgccatatcctttgcctccctgtttcgcaagacggatgcatcaggcatgtgctgcaaccgtccaagacgagctatgctcttgccgatatcgaggccgttccgcactgcgcggcaacctcacaagagcacgtcgactctgcgaataataggtgttatacgtcgtgggtaagtgtaacagaatgcgatgaacctattcctgatacgacgaatcgcaacagaatttccatgttccgcgcgattatgcgcagttttttgcgtcgcttttgcccacattgaccatatttgttcccagcacattcccagacttcattgaggggtataacagtattgcgcaagaaaacggtcacgaagcgcaacaatagtagagccgtattgatttgttcggcttaggagaacgggagaggtacacatgttcgtcctcagcaacgcctggcgggctttgatgcgttccaagggacgcaccaccctaaccgcgttcatcactctggcagtcacgttcggcacggttgccggactggccatcgtgcaggaaaacaccaccgcacacaccaccacatacaattcgcagaaagccaatatggcgattcgcccgagcgcgtccacctggaagaaggtctccgccaccgactcggccaccaccaagcattacatgacctggtcgtcgtacaccgattacgcctcggctattcagaccgccggcaccacgctcgacttcaccgttaccggaacagtgcccgcccgcgtgagtggcgatttaaaagcgctcgatggcggctcgctcggctccgcttccgacgataagaccggcggccagctggtttggcgcgcattctggaccaaggacgcggccaaagcaagcgatcttggcacctttgaaatcgtggacggcaagggcctgagctataacaacaaatccgccaacccagacaccaccggcgcattggtctctgaagcgtttgccaaagccaataatcttaaggtgggcgatacgttcaaggtggccactgccaccagcgcatcagacaccgcagagctcaaggtgcgcggcatctacaagtacacctccgaatccaccgtggacaacccggtggttgccgcccgcaatcgcgagaacgcgatcttcacgaactaccagaccttctccaaggccggactcgacccgcagtacagcaatgaaaccgcctccgggtgggagctgcctgacctgaacgtggtgttcaacgtcacggattctgctacatatgattctctgctgaaaacgctgaagaaagccaagctgccggccaagggctacaccatctcttccccctcgctcgaggcttacaccaagtcgcttgagccgttggataccttggctgctcgtgccaagaccggcgtgatcgtgctgctcaccgtgggtggcgtgctgttgcttgccctagtgctgctggccgtgtggacgccgaagcgcaatgatgaaatcggcatggcgctggtttccggcgtaactcgcggccgccttggctggcaattcatgcttgaggtgttcttcgccaccctaccgtcctatgtgatcggcctggtcggtggcgcctttgcggcaaagcccatcggcgcggcattgatctccggccacactaccgcagtcacctctagcctgatttggcaaatgatctggggcggactcggcgccattttggcgctggctattctggcggccttgcgacttgcgttcttcagcgcagccaagctctttgccgctgatggcgactggggcacagtcagcgaaaccgagaccattgaagaggctgacgacgaggttgccgaactcggcaaggctgtgacccctaccacgactacgaccaacgacgatgcggaggcgaaggcatgagcgagaagaatgaacaggaactcggcaaggacgaagccctgaagaacacggccgaatcggccatggcatccaaggatgccatcaagcccgctccggccgattccatccagttcagcgtcatctttgacgatgcggatggcctcgacctcgagggtgcggatgacgccgacgacaatgcctccggtgatatctacagcatcatggccagcgccgaaagcgccgcggatgtcactgaggcctcagacgccaccgccgaggacagcgcgggcgcagaactcagcgaggcagaagcggacgctctggcttccgcagacacttccgccgcagcgaccaagcgcaatgcggaccgcgtcaacgagacgctgaacctggctaaatctggcggcaaagacgaattggtcgagcacgcagcgccggcgtccaagaccgccgaaccgaccatgacgctcgcctcgcgcatcgaccgcgtgctcgtgggcggcggcgcggatgacatcctgctcaagacctacccgacctttgcgctaaacaaagtcaccgttcccggcgccaaaggcaaaatcaacgtactcgacagcgtggaattcgcctgctacgcgggtcacgcctacgcactgctcatcaccgacgaccctgactcgggactgaccgcagacaccaagcgccgcgcgcttatgggcgtgatgagcggccttgtacagccgaagtccggcacggtgatgaataagagcgccaacatcgccgaactggagcctgtggatctgcgtggccaccgtctgggcatcgtaccgcagctgcacgccgtgcagcccgatctggacgccgagcagaacgtgctctatgccatgaatgcctccaaccgtaacttcctgaagcccaagccggtgatcgctcgtgaactgctggccaaggtcggcttctcggaggcgaccagcggcgttgccgtgagcaagctacccgtggtgcagcagcgcttggtggccattgcccgcgccatcagcacggaagcggaagtactgattctcgacgaaccgacccgcggcttgaacgtggacgacacagtgaccgtgttcgccgcccttgccaagctggcgcatagcggcgacccgaagcactgcatcatcgtgctcaccgcctcgcgcgagatcgccgaagccgcagaccagatgttcgagatctgatttcaagtcgtcgggaaggcccctgcgattcggcaatatcgaatcgcaggggtcttcccgacttcaaggggctgattcgcgcatctcgggaagtctacttccgtttcgaggggctggtcattcagtcaaacgcatgtggaaacggcttggcgcaacgccatttcgccattgtcggacgttgcctacctagacaccagcccctcgaaacgcgagtagatctccggagaagatcgaatcagcccctcgaaacgcaagtagacgtcaaacaaggcccaaatctgttcccgctgacatcaacgtggcttattcccgagctaatctagggataatcctgaccttacgaaacgaaacttgacgatcatgaccggatatattcccacacttgagcagattgacgagctgcatcgcaagattgcgccgtccgaggcggcctatgagctggttcacacgcattgcgtgattgtggcgaccatcgggtgccagattgtgcgacggcagaatgcactgttcacgcgtcgttgcacgctgccgaaagatgcacccgagtggggaagcaatcgtcgcacagagaatacggtagatgctgctgtgtcggctacgcccatgccacctactgcgggcgtcacgggcggccaggtgccgccacgcctactggacgagcatctggtgctcatcagcgggctgctgcacgacatcggcacatatcgcgtgttcaagcatgacggttcggacggcgagccgctcaagttcagcaagaagcggtatattctgcacggccttaagggttacgagtatttgctcgatgagggtgtggacgagtacatcgcccagttctgccgtaatcacactggcgtgggtctcacgcgtgaggacatcatacggcaagagcttcctctgcccccggccgactatgtgccgatgaatcttgagcaggaagtggtgatgtacgccgacaagttccacagcaagtcggtgccgccgaagttcctgcaggtggaggcgtatacggctcgagccgaacgatttggcgaggataataagcggcgttggctggatctggtggccaaatatggcgtaccggatattccggcgttggctgagaagtacgggatgcgagtaatctgagctcccgctggcgggggctgtcagcgaagctgactgggggtggttcgtttccaccaatcagaccaccctcagtcttgcttcgcgagccagctcccgtcagcgggagccgaggaacggtcgaagaacggttcagatggaacgcagacggtaggtaccgttgcggttggacgcgatgatcatctgatcattctccagcacgttccaacccccctgctcatagccggaggaagacaccactacaccggccggatcgccgttctcgtcattcagcgcgcggtagcgcatcacacggtaatcggcggcctgctcgccgcggccatactcgtcgtagatctccacaatgcgtgggctggtcttctcacggccggcagcgcacaaagcaatcagctgatcctcggattgaatcatgcagttgtagctggatttcgggtaggcctggcgaagctcgcgcaccgcctgggccacagcctcgtcaagcgggaatccgaagccgacgtactccagaatcaccgcgaagaagatggcggagtcggagcgtccgccggtggacagaaacacgctgtgatccacggggtaggaacgattggtcacaatgttgcggccattggcatcggaaatatcgccattgtggataaagctcaaaccgttggcatagaacgggtgctggttctccataatgagcggcagattggagctggccagacgcagatgccaaatggcgccgcgagccggctcgctagccaaagcttcaaacgtgctatcggcgcgtgcggcgatggtggacttgtagattttcgtgccggtttccggagtgggtgcgccgccgtcgcgcatgtatggcgccgatgtgggatcagcgagctgggccacaccccagccatcgttgtggatctcggacaattcgcggaaatcctcgacattgccctgacccaacacggcgttaaggctcaggttgaaccctgccgtcgcgtatcccaataatctgcacatagtcagataacttacccgagccatatttcgacgtgcggccaccgttataggcattctttatagagcgcgtcaggctatacacggcggtaactcagttaaaaggggtacattgcgacttctgcagaatgctaactgctttcagcaggggtacccgatatggaagagcccaagtacaaacggcagaataacgccattcatacttgggctctcaacacttaggcacccctctgaaagcagttattattccgcaagagggttcaagtacccctttcaaccgagatacctactttttctcctctgccgacatcgcggcatcgagttcttggaccaagcggctcaggccggcggtggtatccatgggatcgggaacagccgcaggatcggccacgcttcgagtcggggttggcgcaggaactgtcttggtcccatccgtgcgcttcagacgcggcgggcggcgggtggagacgaatagcggctgcacttcgatcaacgggttgtagggcgccaagccgaaccacttgaccggagaaccggccacatggcgaatcgcgtacttggcttgcagcgagagcgcaccgcgagcggagaccttggattccggcatcagcgccttgtgcaccagcacgtaacgaactgtgccaatatccgggtcggcgtccaccttggggtaaatcgacttctgcttgggcagttctccggtcttggacaggtcatgcatgatctggtgaatatacgccggaatggactgcgagaccttgaaccccaggcggaaccgcacacggaagatgtagttggtgccgaaattctccaccgagtattcgcgggtgaacggctcatcggtggtctccacactcactgcccaccatgcgcgggcgcgcttggggtggtcggcgaagatggagaagaagatatccgtatcgagtcgcttggtctccgaatcggaagtcaggtagacgatgttgtctgcaaagtaggggatgcggaagtctccgtgcagcttgtcgagtgcgggcaggaagtccttgggccgcatgtggcgacgctgcgcacgctccagcttggtgccttcgttccacgtgtacatgacaaacagaatcgcgatggtgagcaggcaggtgaaccaaccaccatgcaggaacttggccatagaggcgatgaagaacatgatctggatggccaggaacagcacggtgaacacgacggcgcccacgcgcttgcggtcataccagagatacacgccgagcagcacggtggtggtgatcatggtgatggtcagcgccaagccgtatgcggcggagatgtgctccgaatccttgaagatggcaagcacggccagagtggagacgcacagcacgccgttgaccaccggaatgtacagctggccgcgtgtacgggccgggtaacgcacctgcagatgcggcatccagttgaggcgggtggcctcggaaaccatggtgaatgcgccggtgatcagggcctgggaggcaatcacgccggccgtgacggagagaatcaccgccagatagcgcacgttcggcgtcatcatctggaagaacgggttcagcgacttcatagtgttgaactgcgggttgcgggcgttgttcagcatccacgcgccttggccgaagtagttgagcaccagcgcaatcttgatgaatggccaggtgaagtagatgttgccacggcccacatggcccatgtcggagtagagcgcctcggcaccggtggtggagaggaacaccgtgcccatcagtgcgataccggccgcgttatgcgggctgaacaggaatttgacgccgtacaccgggttaagggcggcgaacaccgaccagtcgttgttgagattcaccacgcccacaacggcgaggaagctgaaccagaccagcaccatcgagccgaagaccttgccgatgctttcggtgccacgagactgcacggagaacagaatcacgatgatcaccacggtgatcatgagggtcaggctcggattctcgtcaaacagctgctcgagcggcggcaaagtctgcagaccttcgactgcggagctgatggacacggccggtgtgagcacggaatcggccaggaaggccgcgccgccgagcatggcgggaatggcgagccaggctccgtatttgcggatcaacgagtagagtgcaaagatgccgccttcgccgttgttgtcgatgcgcatggcaatcagcacatatttgacggtggtaatcagcgtaatcgaccagaagaccagcgagagcataccgagcacggcctcgcgatccacgttgccgaggccgccttgcccggcaaggaaggtctgcgcggtgtacagaggcgaggtaccgatgtcgccatagaccacgccaagggccacaatcgccatgccccacgtgaccttatccggtccggattgcaggcgagcccaccaacggccaagacggcctttggaagaggcgctggcgattttctcggcttctcgcgtctcggcctcgcgctgtttggcgatggcctcgcgctcctccttggtgagggtgcggcgggaaaccttgggagcgttagtgaaggtgtcggccctcagcagggcttcttcttcctgcttagcctttgccttattggcaccagccttggcattagttttctgggccttttggggctttgccgctttttgggcgcgttcagcctgtttatctgactcagccatacgttcagtcctccattgaggtggagatcctccccctcgcttatgtcaagcaatatatcgtagacctcgttggcgattcttacaaattctgctcaattccaagtcaacacagcgccacaaaaggggcaaatcaacacgtcattgcccacttctgcggcctgtgcggcgcatcccaaggaataatggcagcgagatcgctcacaccccgtagaccacacgggtggtgttgcgggtgccgcgggccacatcggcaatgggcaggtcaagcgtatcggccatggcacgcagtgtgtaaggaatcatgtagggtgcattggtgcggccacggtacggcataggcgtgaggtacggcgcatcggtttccaccatcgcgtggttcagccccacaatgcgcagcgattcgcggatgccatcgttgcccttataactcactgtgccggagaagctcaggtaccatccatgctcgcgcgcaatctcacccatctcgcggtcgccggagtaggagtggaacacggtacgctcgggagcgccgtcggccagcagagtctcgatgacttcgcggtgagagtcgcggtcatgaatctgcatgggcaggttcagttccttggccaaagcgatatgcgcgcggaaagcctcacgttgcagctccttagccccctcgccggtacggaacaggtccatgccggtctccccgatggccaccacctgttcggggtacgtggtggcaagacgatgcacttcagcgagagcgtcctcaaagctggtgtcgtggtacggcttgtatttgagcggcagcccatccggccccggcacaccgcgatgaccgtggagcacggattcgttgggatgtattgcgagcgccgcgtgcacattacctggatgatcgagggccatctggacggcggtcatcaggtgcggcagctcgcaaccgcagtcgataatacccccaataccgacggcttgcgcctgtgcaagcaactggtcgacgtcgtacaccgggacttcgggctgccctttttcctgtgcctcgtggctcatggcccgcgcaaacggtatgacggaggccacgtgggtgtggttgtcgatggtctgggcgtcttgcggcagcggttcaggtgccggtgcccagctacggtcgcgatggtggtgcttgctcatagctccccagtgtaggcaaacaccctaccgcgcccatcaccacctcgatgcccttcccgaatttgtaccactgacaacgtcgtagcgtcacatattcaggaagcaaccccacacctcccgaatatgtaccactgacgatcgctaaacgtcacaaattcgggaacatccccatctcccgaattcgtactactcagtaacggccagcagtacaaattcgggagattggggatatggggcagctacgggtgaccgagctactcagtagccccggtggccacgcgaatcatcgcgtattgggactcgtagaggcggtagtacgcgcccttggcctccagcagttcggcgtgcgtgccgtgctccacgatctgaccgtggtcgatgtagaagatctggtccgcgttctcgatggtggacagccggtgggcgatgatgaagctcgtgcgacccttgagcagatgccgcaagccggcctgcaacgcctcctcggtgcgggtgtcgatgttcgaggtcgcctcgtccagaatcaggatgcgcgggtcggcgagcagcacacgcgcgaacgcgatgagctggcgctgcccggcggacagggtcgagccgcgctcctccaccgtggtgtcgtagccatcaggcagctccatgatgaactcgtgcgcgtgcacggccttcgccgccgcctcgatctcctcgtcggtggcgtcgagcttgccgtagcggatgttgtcacgtacgttgccggagaagatgaacgtgtcctgcagcatcacgcccatctgccggcgcaacgattcaagcgtcacgtcgcgcacgtcgtggccatcaatggccaccgaaccttccgacacgtcgtagaaccgggacagcaggctcacgatggtggtcttgccggcaccggtcgggccgaccaaggcgatggtcttgcccggggtgacgtggaagtcgaccaagttcaggatgttacggccgtcgtcctcgtaccggaacacgacgtcgttgaaatcgaccttgccttgaatggcgggcagctcggtggcacccggcttgttcgcgatctcgggcttgacgtccagcgtctcgaagatgcgttcgaggtaggcggagcaggtgaccagctggttgtagaagttgccgatgttgatcaccgggttccagaagttgttcgcgtagcccacgaacgcgataagcataccggtggtcacgctcacgccgccgaagccggtgatgcccacgaagtagatgaacgcgatggtcatcacggagatggtctgcacgcccggccacatcaggaattcaatgtgcttggcggccatccaggcggtacgtacgtcgtcttgctgctgctggaaggtgccgaactgctccttctcgcgggcgaaggtctgcgtggtcttcacgccggcgattgactcgtggatgaaggcgttcagattgctctgcttgttggacagcacctgataagccttgcgctggaagtactgcagcacacgcacccagatgatgagcaccgggaacagtacgaggctccacaatgccagctgccagtcgatggcgaacatgacgatcagcgtcacgaagaatgtgaagatgtcggagaacacgttgatcagacccgaggagagcgtgtccgaaagggtgttcacatagttgaccacgcggatcaggatcttgccgtgcgggcgcgagtcaaagtagctgaacggcagggtctggatgtgtgtgaacagatcgcggcgcatgtccttgagcatgagctggcccacgcgagtaatggccaccgtgcggtagcgcagcgcgagttcgtagatcatgatcagacagaacagcccgccggccagcatggccagtttgccgagatccttgttcggaatcgcgtcgtcaatcataatcttggtcaggtacgggacgctgaccacgatgcagctcatcgagaccacgaccgccaggatgcgcacaatgcgcgaaatgtacggtttgaggtatttgccgacgcgagcgatgtcgtggaggttgatggactcctccagctcctcatcctcgcggaatgtattgcgttgtgccataagtcctcttctcaagccccctccggcgagggggctgtcagcgaagctgcctgggggaaagatatgtcgtcaaaatctcccccctccgtcatcgcttcctttatttattgctcacctatcggttcgccctcgcctaaaaacagcccacagggctgttttcttcacggctcagccctcgtcagagggaggttgaacgacggttaaaacccctgtgcggcgccggactggagtccgagctgcttgtggtagatgccccagtagcggccgtgtgcggccacgagttcggcgtgggtgccgcgttcgacgatgcgtccgtgttcgagcaccagaatcaggtcggaatccttgaccgacgagatgcggtgggcgatggtgacgatggtcttgccgccgtccatttccttgaggtgcttctggatttccgcctcggtctccatatcgacggccgaggtcgtatcatccataatcaggatcgacggatcatccgcgagtgcgcgggccagcgacaggcgctgtttctgcccgccggacaggcccacgccgcgttcgcccacgacggtgtcataaccctgcggcatcgacctgatgaaattgtccgcgccggcgatctgggccattttccggatatatcggtcgtcgctatcatcgctggcaccaaagccgatattgccaccgatggtgtcggagaacaggaaggtgtcctgcgccacgatgcacacctgcgagcgcaaggtggccagcggccagtcgcgtgcgtcgatgccgtcgatgagcacatggcccacggttgggtcgtagaagcgggagatgaggctgacgagcgtggacttgccggcaccggtctcgccgaggatgccgagtttggagccggcaggcacggtgaagtcgaggtctttgaggatcggggtttccgggtcgtccgggaaggcgaaactgacgtgggcaaagcggatgtcgcctttgatgcgtagcgggcaggacttgcgttcggcggactgctgggcaccggatgttccggaagccccgggcgctccggtagcaccggtagcctcatcatcgcgcttgacctgctcgacgattgtgaccgcctgcttgacggcttcggccgcgtcgggcttctccacgatgcgcggctgttcggtgagcagcttgcgaatcttgatacagctggcgttgaatcgttgccagtcgttgatgagccagccggaggcacgcaccgggccgtcgatcatccacaggaaggagttgaagctcactaagttgccaagggtcatgtagcccttgatgaccaggaagccgccgaggccgagcgtgatgagctgcagcgaaaagccgaggccgtccagccagggcatgtacttgcgcgagttgtaggccagggccatgttgcgctgcatgtagtcgtcgttgtgttcgtcgaacttttcggtttcgtacggttcgcgcacgaatgccttgaccacacggttgccctcgatgttctcctcgaccatggagttgagggaggccagcgagttgcggatggcgaagaacagcgggtgggcgtgcgtggacaggccgcgcgtgagcacaaaaatgaacggcgtgacgcaggccagggcgagcgcaagtcgccagtcgatggcaaacatcacacacagggcaccgatgaacatgaccacgcagtcggcgatctggtagctcacccaactcaggcagtggcggatcgcgtcggtgtcggaggtcaggcggctcatgatgtcgccggtgcgtgtgtggttgaagtacgtgaagtcgagctcgtgcagcttctcgtattcgtcggagacgaggcggtagaccgagttctggccgaaacgctccatccacatctggtagccgtatcgcgcgcccacgcggatgatggtcatgaggatcatcagtccgcacagacgtggcagttcgtcggtatgcccgccgacgatgacacggtccacaatgatgccggacagaatcggaatggtcagggccatcgtgttattggcgatgaacagtaggagcgcgcctgccacgcggggcaggtctggtttgcagtatggcagcacccatttgaggttgcttgcgctggtattgattcccggatcgacgtacatgtgaggagatcaccgtttcttggggattgtttgcttgtggtatggtgcggcatgctcctgcgccgcacgcggcaatcgctgccgccacgattcacgatcagccgtgcttcgtactgcgacaatcattggcgatcggtcgcacgaccggagctctccttcaccggtcgaagcacgttcgactttcgtaaacgcgtactagtctaggcggcttgcgtccaatcgcaacagcccgcaaccctgcgtgttccccgcattagcaacgcggcacggcccgctaagcgcaacattccccggaatgtgtcgcggcgcccccaaacaggcccaattcgcgaagcagtccccggaatgtgtcgcgcgaaacgttgcgcatgcggcaatgcacgcttgagacctgttgcataccagtcgaccaaattatagaatcataattcacgttttacgtattgtgcgacggaatcggcatctcctgcaacacgtgagatatgcaaaagtgccgcacgctgaatggtgatcagcgtacggtactacagggaatacggcactacacggatcgcgtgacacgcacgggtatgcacggtatacgtgacatgcacgaaatacacgctatacagcaaacacacgcaaaccgagaagcgacagcctacaggtcagaacgccagcgagcgtacgtaggaaccaacttgcgggcggacgggcaccaacgagccgtccgaatcatagtcaagcggcgcgaagggcggcttccatatcgtggccaccgacctctctattcaccaccgcggcggctggggttcgcatgacggcgccaccaccaccgatttccgcaccttctccgacccggtcaagtggattgaccgcaagaacagcgtcatcgattcgaccatgctgcgagacgatgacggctggtggtaccgcgcttccgaggacgccgaaatcaccatcgaacgcacgcgcaatccgtacgcctccgcctacgaggtgctgcgtaccgacgacgaccagcagtggtcgtacgtggggtcgctgaccgacattctcggcaatggccgttactcctggatgtacctggaaggaccgggattgttccgctacaacgatgccgatgtcaagaccatcaacggccgcaagatgcgcttcggtctgatgtgcgatcagtacgccgaggccaagggctaacctgtccttccgttcggccgacctgtccagccgcgagcccgaggattgggccgtggccgacgacatcgacttcgacgagctcaagaagcgccacggcgcaatcctgcccaccaccaccgccgaatacgacgccgtcgaggccgccttcaagctgtaagccttaaggcttcgccactacaggccggtcgcggaccatatccccagtcagcaaccggccgaaccatatctcgcggcttcagtcatcctttatcatcagtattcggtagcgaccctaaatcagctccgccatccggctcataatcactcgccaaccacgggcggaagtagctcccgactatccacagtgggacattggtcagccaatcctgctccttgtaattccgcatcgacgtacggtaaccgcaaatcccgtatttgtcgcacagccacttcaagctacgcttatgacgctcggtaccagctttggcctccaacggaatgattgcgccattacctgcaaagacaaaatcaacttctcccgtactgttcgcattcgaccagtacatcggtgtgatgccggcggccactaattgctggcaaacatactgttccgttaacgcaccacggaattcggtcagcccgccatcaccaaggaccacgcttgcgggagtcagatccagggccgctgccagcagcccaacatcatggagatacagtttgaacgcggaatcatcacggtatgacggcaatggtgccgcaggtttttcgacgcgatacacccgcaacgcaagaccagaatcgacaatctgctgaatcgcggattcatattgcgccgcccgagcgccacgagcgatgtggccaaaaataaatttatgattctcacgcgccagatgggacggaatcgaggaaaacaccaaacgcattttctcactatccacaccggttctgggatgtttggaaaagtccatgccgtaattggataacaattctttctgcacggcacgcgcatgctgatagccatcttctacaaatgtctcaacgacttcgggcatgccgccaacaaaacagtactgacgaacccttcgctctaaacgttccgcaaatcccccaagtgtctcaatacgctggttccggatgcgttcggctatcactccatcaccgaccgcttccaagaactccacaaacgtcatcggatacatatcgatggaggtgacactgccaaccgggaatgacaggtcttcgtgctgagccatgcccagataggagcccgctacagcgacatggagatccggcatttcctcatggagcgctttcaacagagtcagtaaatcagggatttcctgtatctcgtcgatgcacagcagcgtcttgccgggccgaacgcgaaccccgttaaacgcctccatggaatcaagcaacatgtgcaccgaatccacacctgtcaacgcagcctttgcaccgccatcgaacaaattgacataagaaaatgactcgaacttgtcccgacccagcaccttaagcacatgagtcttgcctacctgtctcgcgccgcacagcactatcggcttgtgctccgtcgcttcagcccatgccgacaacctggtatatatatctcgcctgaactccgccatgccaccctccctatcgcataggaccgtacatcacaaatcactgtcctgtcgctccatcataccgcaatacacatttttcctagggttgcaattcgcgtattctacatttttcctagggttgcgattgtccaagattacattttttctagggttagtaatgcagaatactgcacttttcccagggttagtaccctgaccttccctaatcacacggtgttgtaaaggcgagcggggaaggcgtcgcggtattggccgggggtgagtccggggcggcgcttaaagacgcgcatggagtattttgggtcggcgtagcccacgtcgtgcgcgagagcgtgcgggatttttatacggattgtgttctttctgatcaaccggcaaagcaagcgatggcgcgcgaaatgcttggcgtaatttgcaatcctctaacttcgacgctgtggtgcgggttagggcaacgaaacattacagtagcagcagatggcaaatggttcgtagcggattcatgcacgtcgctgtcatcaagtatccaaggtttcgcactgccactcatcgcgcagaccgtcacgggctcaccggcacaggcgacgctgctggattcgatcatgaccctgatatcgtcggtattgcggctgccaggtggcgtggtacaagataagtacgaccgcgaaaaacttatgattgcgttcggcctgattggtttcgcactgttcggcatatgcgcggccctaggatgggcgggattactcatatacccggtgctgatggtacttgcgatatgcctcggcatgggcatgattgagacgattgcggccccggcgatcacatttctgtccggcatcgccatgcaacactggggctactcagtcacgtccgtggctttgggcttgtgcatcgtggcggtgacgggctcgcgccaggccggcacttccaagcgcaccatgcggcgggtcacgtcttccacctcgccatggcccttctcgtcgatgctcttggcgccggcgtggaagtcgaactcctcgaccaagtgacccagacagtacagttcggggtccgggtgttgggtgaggttgtacccacggcttcgatccacttggagaagtcggtgtcctagaagacgaagccgtggaactgtccggttccggcgcctgcgcgggcagcaaggtggacaaatcgttgctggggtggaatcgcggcaagtacgcaaaaacctcccgttcgcgcgcgatgtataagcgcgcaaacgggaggcttcccaaccgcagcatcatatgcagaaataaggagtgtaaggcatatgcggctgcggtcacaccccgccgggaacctgctgcaggccgcgtccggcatcgaaagccatgcagtcgatgcgtgcggccgaccgttcccggcgcggtggccatgtcagtcagacatcagtcagatgtcaatagacatccgatcagacatcatcacttctgccagccgatgtcctgcggcaggttgccggcgaagccggacgggccgtagttggccagacccttcttcgcaccgaggtacgaagccgggttggagaccgggatagtgccatacagcttgaaggcttccttctcggcggcgttcacagccttggtctgctcgtcatagtcggagaggctgccagccttcttgacgagctcgtcgatcttcttgctgcccacgtaggagaagttggacgggccgtcggaggtgtacagctgcggggcggacaccacgaaggtcatggcgctcggagcctgccaagccatcggcagcacctggtagttgccggaagacacggtgtcggagaacttggactcggccacgttcacgaccttgaccttgatgccggccttcttcatcatcgcctggtaggcgttggcgagggcctgctgggtggcgtcgtcaccgaagaaggtgaaggagatctcaagggtcttgccgcccttggcgtagtagccgtccttgcccatcttgtagccgtcggcctcaagggtcttcttggcgttgtccacgttgtacttggcttcggcgggcaggttgttctcgtagcccttctggaacggcagcagcagctcggagcccggctgctcggccttccagttcaggccctggaactgcacgttgttgtaggtgttcacgtcgaaggcctgggtgatggccttgcgcacctgcaggtcgtcgagcggcttggacttgccgttgtattccagcacgcgggtcttggtgctgtagccgatgcgcagctgggcgtccttgacggagcggatggccttgatgtcatccttggtggaggcctccacggcgtcgatctcgccgttctggaaggcgttgagggaggcggtgtcggccatctgcttgtagacgatcttgtccagcttcggcttgtcgccccaccacttctcgttcggcacgaaggtgacctgggaatcggagaaggagtcgaccttgtacggaccggcagcccactcgttgtgcgggttcttgacccagccggaggtgaaggtcttcgggtcggcggacttcgggttcaccagaacactgaagacttcctgccacgggtagtacggggtcttgtaggtcaccttgacctgcttcgggttgtcgccctgctcaacgctggcgatacggtcgaagccgtcggtgctcggcgggttgtagtccgggttggagccgttttgggcttcccacgtggccttgaaggcggtccagtcgatgtcggagccgtcgttccacttggccttcgggttgatgtcgtactgcacgaccatcgggtccttgctcacgagcttcatgtcggtcaggaagtccgggttcaccttaatcggggagccattgacctggtcggtcatgagcaggctgggctggtaccagctccacagctcggacatgtagccggtgttgccgtcggaagacaggtagttccagttcgggccgatttcgacgatggacagggtcagcgtgccgccgtccttgacgttgtcacggctctggtggttgtcgtaacgctcggtgaccttcggcatgggcaggtcgccggtgtacgacgaatcgatgccggccggcggttcggtggcgctcgaggcgttgctggaaccgttgccattgcccgcgccgcagccggcaagcagcatggcaagcgccgcagtggccgcggcgagcgcggtcagcttacgtgtcttgttcattgttatttcctcctctatatggttccgaccgtcatgcgaaatggcatgcaacctgatggccgctcggtcgggaagtgtcatacggccgcagcgccgggcgttcgccgcggcagcgggcctgttgttcggcgctcagcttgggcatgagcgggcagcggcccatgaacgggcagccttcgaacgtctcggtggggctgggcacctcgccctgcagcacgatgcgctggcgggtgcgttccgccttcgggtccggcaccggcacggcgctgatgagcgcctgggtgtacgggtgcaacgggtgctcgaacacgtcttcggtgtcgccggattccacgatgcggcccaggtacatcaccgccacgcggctggagatatggcgcaccaccgacaggttatgggccacgaacaggtaggccacgcccagcttgttctgcaggtcctcaagcaggttgatcacgccggcctggatggacacgtccagtgcggagaccggctcgtcgagcagcacgagcttcgggttgaccgacagcgcacgcgcgatggcgatgcgctggcgctgaccgccggagaactgcgtggggaagcggtccacctggtcggggttcagctccaccagacgcatgagttcaccgatgcgttcgcggatctgctctttggagtagtgctggaccttcatcggctcggccaggatgtcgtagatcggcaggcgcgggtcgagcgaactcatcgggtcctggaagacatactgcacggccgaacgcagctcgcggcgcttctcgcgcggaatcttgtgttcgagcttggtgccgaacatctcgatctcgccgtcctgcggctgcttgaactccatgatctccatgagcgtggtggacttgcccgagccggactcgcccacgagcgccacggtctcgccttcgcgcacgtccagcgtcacgtcgtccacggccttgacctcgccgatcttacggcgcaggaatccgccggcggtcagcgggaaggtcttgcgcatgtgcttgacgtcgagcaccatcttgcgttcgtcgcgcgggatgccggcgaacttcgacttggcggcctcggccaccgtgtacacgtcgtggaaggtcaggcccttgtccacgatctcctgggtgcggtggcaggccacgaactggcccgggcggcccggcaccggctccatggccggctcggtggtgtggcatatgtcggtggccagcgggcagcgcggcgcgaacgggcagcccttgggcatgttgaccaggttcatcggggagccaggaatcggcaccaggcggctgttgcgttcgcggtcggaacgcggcacggcacccagcaggcccatggtgtacggcatggccgggtggtcgaagatggagtcgacgtccgccttctcgaccgggcggccggcgtacatgacgacgatgtcgtcggccacgccggcgatcacgcccagatcgtgggtgatgaagatgacggccgcgccggtttcacgctgggccttgcgcagcacttcgagcacctgggcctggatcgtcacgtccagtgcggtggtcggttcgtcggcgatgatcacgtccgggtcgttggcaatggccatggcgatcatcacgcgctggcgcatgccgccggagaactcgtgcgggaaggacttcaggcggtcctccgggtccgggatgccgaccaggttcatgagctcgatggagcggtcgtgaatctgctgttcggtcatcttcggattgtgggtgaccagcgcttccttgatctggtcgccgatggagaacaccggggtcagagcggagagcgggtcctggaagaccatggcgatgcccttgccacggatctcgctcatctcaagatcggacttgctgagcaattcctcgccgtggtaggtgatggagcccttgacgctggcgttcttgtccagcaggcccatgatggccatggaggtcacggacttgccggagccggactcgcccacgatgccgagggtcttgccggggtacaggtcgaagttcatgccgcgcaccgcgtgcacggtgccggcttcggaggcgaagctgacggtgaggtcgcgtactgaaatcaccggttcggatgccatgccttgcgctcctgtggtgttggggttggtgttggttgttacgttgcttgcgttgcgttcgtcgctcatgatgcccgtctcccctctcactcggccttgccgccagaacgggagtacgggtcgatggcgtcacgcagtccgtcgccgatcagctgcacggagaaggtcaggacgaccagcaccacggacgggaagatcagcacccatggcgaggtctgcaccacggactggccggcgttgagcagcgtaccgagcgaggtgtcgggcgccttgatgcccaggcccaggaagctcagcgaggtttcgctgttgaccgcaccgatcacgccgagcacggtgttgatgaccagcaccgaacccaggttcggcaccagatgacgcacgatgatggtgaaggacggcacacccatgaacttcgccgcgcggatgtattcgcgatcgcgcaggctcagggtcagcgtgcgcagcgtacgggcgtagccaatccaaccgaatgcggtcaggccgatggccagccacagccagtcgctgccgccggccgccatgccgacgatcagggcgatgagcaggaaggacggcacgacgagcagcatatccagcagccacatgcccacgcgctcgaaccagccttcgaagaacgccacggccgtgcccaccagggcggcgatgatcgtggtgccgaacgagctgaagataccgatggtcaacgaacggccgaggccgcggatgatcatcgcgtacatatccgagccaccgaccgtggtgcccagccagtgctgggcggacggcggcgaggcgagggcggcgaaatcgggctcatcgtagctccactgggagaatttcgagccgaaaatcgccaaaagaatcagcagaatcagcaccaccagacccaccacggccgaggggcggcgcatgaagcggcgcacgtacagctgcatgcggccggtgcggtggaagtcgtcggcgctggaagcctcctgggcgttcctggcgtcggcggactgcggttcgctgccctgcggatcggtgagttccatatcctgggcggcagcgtcggagaccatgttttcgttgtcgttcatcatgttagatcgtcctttgcgcggggctcagctcagtcggatacgcgggtcaagccaggcggagaagatatccgccagcagcgcgccggacagcgtgcacacgccaccgaacgcggccacggccacggcaccgttgatgtcgttgttggcgatggtctgggtgaagtacatgcccaggccgttgatggcgaacacgttttcggtgatcaccgcgccggtgaacacgccggcgatggagaaggccacatccacggcggtcggaatcagcgaggtgcgcagtgcgtggcggcgaatggccgcgttgagcgtcaggcccttggcgcgggcggtgcgtacgtagtcggcgttcatggtgtcgagcagatacgtacgctgggtgaggtggtagcccaccatgcccggaatcgtcatcacgatggtgggcaggatcaggtgctgcagatagtcaaacacccaaagcaccgggttggagccttggtaggagtgcaggccggtcacgtagaacgcgcggctgcccacgatgttgttgaagttgatggccagcagcaccaccatcaggcccatgacggcggccgggaccaccaggaagaacgttgcggtggtgttgagcacgcggtcctgccacttgtactggcggatggccgtgtacacgccgatgctcacgccgaagaggatggagagcacggtggcgagcgtcaccagctgcagcgaagcggagatacgggaggcgatggccggcgccaccggcgactggtccgggctcaggccccagttccactgggtgaggatgcccttgagccagcggaaatagcggatgacgaccggcgtctggtcgttgatgttggccagatcgagtgaccggttaatcgacgcgatcggcggatgcggattgcgcgacatgtagttcgaacgcggatccatgaatgcgctggccaggaaatacgtcatcgatactgccacgaacagcatgatcacgtagttcacaatgcgcttgatgatgtacttgaacacccaaccacctcccagataactgggaaagtgatacccccccccccgctcaaaaccccaaatcgagttcaatatatggactatgggtattgacttttttggccttctcatgtacggaaaactgcggaaacgcttactggatattggtcaaacgctgggtaaacatccgtttgttaattttgtatttcctgagcctttgctggacatgccttatacttccgtgtcagcagtccgccgactcggatggtgacagtccccgccgccggcaacgtaatacccatcaacatcccatcagacaggggcatcatgacgacagacgccagcgcacgggccatcaaacccgaacttctgcgtacgtacaccgaagacttcaacaaggaccgcgccaacctgatcgcggcggacgcggcggtttcggccggcgtgctcaaggcggccaccgactatcgcggcgtacgtgcgctgccgcgcgacttctccatcgaactcaagcagggttcgatcaccaatcaggagcgttccggccgttgctggatgttcgcgtccttgaacacactgcgttacgaactcatgcatcgctggaatcttgaggacttcgagttctccgagacctacctcttcttctgggatgcgatggagaagtcgaacacctacctggagaacgtgctgcgcacgctcgacgagcccaccgactcgcgcctgttcgaggccatcaactggggaccgtccgacgacggcggctggtggcagatgttcgccgcgctggtgaacaagtacggtctggtgcccaagagcgcttacccggagtccgagaactcccgtaattccgacgatttcaagcagtacctcaactccaagctgcgcgagttcgcggccgagctgcgccgccgttcggctgcgggcgctggcgaggacgagctgcgcacgctgaaggacgagtacatgggcaccgtgtaccgcatctgcgccgtgtcgcttggcgagccgccggagaagttcgacttcttcgcgcgcaccaaggatgacgccgaggacgataagaagtgcgacggcaaggcctgcaagtgcaaggccgacgcagacggcaaggccgaatcctgcaagtgcggcgactcctgcaaatgcgagggcaaatccgacgccaaggcctgcaagtgcaataaggacaagtccgacaagccgaaaaccggcaaggacgagcgcccgcagattcgcgagatcggcatcaccccgcttgagttctacaagaagtacgtgccggtggacgtcaacgatttcgcgacgctggccaacgccccgctcaagaaccgtccgttcaaccagcgctatcgcatccgcttcagcgcgaacgtggccgaggcgggcgatatggagttcgtcaacgtgccgctggacgtgttcaagaaggccgcgcttgaccagctcaccgccggccatccgatctggttcgcttgcgactgcacgcagttcgccctgcgcaaggacgggttcttcgaccagtccgtggtgcgcgtcgaccagctgttcggcaccgagttcaccggagacaaggctcacggccttgaatacggcgacagcccgagcaaccacgccatgaccttcaccggcgtgaacctcggcgaggacggcaagccgaaccgctggaaggtggagaacagctggggcaaggacgccggcaaggacggctactacgtcatgtccgacgcctggttcgaccgctacgtcaccgagctcatcatccgcaaggaatacctcgacgacgccacccgcgccctgctcaccgccgaaccggtcgagctcgacccctggcagccgctgacccgccgctgccgctgacgttttctcttagctcccgctggcgggagcatatattcgaatgccccttctctctgttcagagaggaggggcattcacgtttatttactgagctttggcgcctcgtgcttggtgtagcggaccacggcatcgggaaatccggcgtggatgtagtcggacagcatccgcaatagtcgctcgtcaaaggtgttctgttcatcgctgctggcgtcgaccaggatgaaatcccatgagtattcgatgtcgccgtcgttgatgatgagaccgcggccggtgatctttgcggccagcaacgcggcaatctgtatggtgcctcgcttgaccaaggccgattccgcttgagtcaggttgcccggaaatgtgacggtatacatggtcttcccttcgttcaatgaacgcaacagtccctcaccataggtagaagaaaactccgccacaattcgggtctcatcacgcaaccagcagtcaaaaagaagaaacccggcggagggggccgccgggtgagagagaagagagaagaagggttcagttatggggttcggaagaacctcgccaccggtatgaacttcattccgttgacatgttctatataaccgtctcattcttggggattcgatgtgcttgtctgggaaaagtcttggcaaactgtgacgggtttgtaacgctgcccgacaaccggcacaactatgtcgggtcttacgctctgggcattctcgtgtccaaagccgaatgacactatgagcacaggggataccccgcatcaagagcatggacgcacaatgtgccggtcctaatcgcacataatgaaacgggccgcaccccatcgccacgcaatgcggcgaaaggaatgcggcccgtcagctatggactaacgacgtcgaatcactcggcggcgagcttggccttctcggcggccagacgctcggcctcggcggcgcggcgagcagccagtgccttgtcgaagcgagccagctcctcttccacggcctcggtcgggatcttggcgaagatcggcgtgggcttgggcaccacggcaccgacctcgatcgcctcgctcttccacgggtgcacgttcacaccgagctcgtagtcgccggtgatgatcgggtacgtgaagccgggcttgtcgagatcctcgacttccttgagctcgggcagcggcgagaatgtaccggtgccgccgagcgcctcccacactttctgtgcggaatgcggcaggaacggtgcgagcagatggttcgcgtcggccacagcctgggcggccacgtgcagcacggtgccgagacgagcctggtcgtccttaatcttccacggttcggtggcagaaatgtacttgttgatgtctccgaccacgcgcatcgcctcggatagggcgtgcttctggtggtgggtttcgatggaggagccgaccacgtcgaacgcggcggaagtctcttccagaaggccacggtcttcgttggtcatcgaatcctcgtccagcggcggaatctcgccgaagttcttgttgatgaggttggccacgcggttgaccaggttgccccaggaggaggcgagctcctcgttgttgtggcgcacgaactcggcccaggtaaagtcggaatcagaggattcggggccggccacggaaatgtagtagcgcacggcgtccacggggtagcgggcgaggatgtccttgacgtagatcacaatgccgcgggaggagctgaacttcttgccttccatggtcatgaactcgctggccaccacctgctcaggcaggttgagcggacccatcgggccggtttcgccgcccttggagcccttgccgttgtatgcgagcatttcggacggccagatctgggagtggaaggtgatgttgtccttgcccatgaagtagtaggccgggcacttcgggtcgttccaccattcgcgccacttctccgggtcgccctggcgacgggcccattcgatggaggccgacaggtagccgatcacggcgtcgaaccacacgtacagcttcttgttcgggttgtcgatccaacccttgaccggcaccggaataccccagtcgatgtcgcgggtgatggcgcgcggcttgacttccttgaacaggccaagcgagaaattgatgacgttggtacgccagcccttgcgggtctccagccaagccttgttggcttcggcgagcgccggcaggtcgaggaagtagtgttcggtctgctcaaagcgtggggtttcgccgttgatcttggaaaccgggttgatgagctcgtccgggtcgagctcgttgccgcaggcgtcgcactggtcgccgcgcgcgccttcggcatggcagatcgggcactcgccctcgatgtagcggtcgggcagggtacggccggtggaggggctgatggccacctgctgggtgcccttgtagatgtagccgttctccaagcactgcttgaacatctcctgcaccacgtgctcgtgattgccggtggtggtgcgggtgaacaggtcgtagctcaggccgaggtcgcacaggtccttggcgatcacacggttgtagcggttggccagctcctgggccgtgagaccttccttctccgcctcaacgagaatcggggtaccgtgctcatcggtgccggagaccatgagcacatcattgcctttcatgcgctcgtaacgcgcgtaaacgtcggagggcacaccaaatcctgcgacatgaccaatatgacgggggccgttagcatacggccaagcaacattcaccaaaacatgactcataatgtttgattatccggcgcggcggggacacgccgggcacacgcataagcaacgcgcggaaagcccatcgaaatgccgatgcacagcacaaagagcatgcctaaacatgtggattaccaaccattgcgcagcccctcaacaaaccgcccacagcatcgtccacaatctcggcgcggcagtcggaattatccacttatccaccgttttcgcctatccggtagcgcccgagcgcaaactatgcgtatggtcgggcacatgaatgcaccaaatcgctcgatgacgagcaccatagccaacgccggcaccgctcggcacaccaccgtcagcccatcagtgccgcccgtgctgttcaccaaagatctgcccggaccgctcagcttaagccggctggaaacattcggcaccatacgaaagttcgacgaatccgctggctactggaacgaacacgccagcacactatatggccgcgcgatgattgtctccacggtcgccccgttcggaaccgtggcgtgcgcgctgactgccgcctggatatggcttggcggtccggattttccgagaaccattgacgtgatttccacttcgcattttcgttcgacttccgcaggccgccgcatccgcgtattcaggcgggtcacgtcgccagagcacattattcgactgggcaatcttcctgtcaccacaccgcagcgtacagcctgtgatctggtgatgggcatggacgatgcgccggacccgtccgccatcaatacgttggtatgccgcttgatgaccgcatacagtttccgtgccagcgaatgcctgcaaatcatcaaagagcaccggcatcataagcatgccggtcgcgcacggatattttttgaatcattgcaacgggagtccgaaccggccttagggcaatgcgcataataggccgccatgcttcccggcgacttgaccgtctgcatcaagcgcagcggctaccgcgcgcttctgatattcaatcgcatagcccacacgcgagcgctgctgtcaatcatgatgccccaccatcgccgccaatcgcattgaccccatccgtagcctgttcgccggatacgccaatcgaagtgctgtggcatatcgcccagcatgcgcccgaactcaggcgctggcttattgccaatcctcgggcggatgcggcattgttggaattcatctcgcaggcgggcggaccaggagtgaagcgggcgctggcggtgctactggaatcgatggaggaggaataatgctgccgcaagtctcatcccccggcaaattaccgcggaatctcaatcattacagatgccatcaattatccacgtcaatcgcaagcgccaaccaacggcatcatgtaaatacgcggatcctaccccttaatctccaacaccgccgcatacacttgcttgcgattggccagcgaaccatcggccaacggatgctcctgcaccacctgcgcgatggcgtccttgatacgcaggccatcctccagcgcacggtcgatagccagcacggccatatcttccacgctcaacgtgctgggcgcggcggcctcggcctcttcactggaagcgccgccgatgaccaataccatctcgccgcgcggcggatcgtcaatcacactctggcgaatctctccgattggacctcgccggatttgctcataatccttggtgagctcccgacacagcgccatcggacggttcgggccgaatgcgtcaagcagatcatccatcgaatcggcgatgcggtgaggcgtctcgtaaaacacaatggtgcggcgttcacccaacagtgtgcgtaggtattgcactcgttcggcatgcttgcgcggcaggaatccctcgtagcagaagcgatcggtgggcaggccggaaagggcaagcgcgtcaagcacggcagaggggccaggcgcgcaggtgacgggcaggccgcgttcaatggcgcggcgcacaatggccaggcctggatcgttgatggtgggcatgccggcgtcggaaacgacgagcacggtcgcaccggtttcgacctgatcaagcaaaccgtcggccttgtctcgctcgttgtggtcatggtaggcgacgactcggccgttcacatagacgccgaggcggcgagccaggtcgaacaagcggcgggtgtcttctgcggctacgatgtcggcacgttccaaaaaagccaccagacgagcagaagcgtcgccgacgttgccgattggggtcgcagcgagtaccacagtgccagcaggaatagtcacagccgactcgcgagtttgggaagcggcaggttcgccggcatcaatcccatcgttcccatcgttgcgttcagacacttgtgcgacgctctgttcagcgtcacgctgttcattcaactcatctgcacttgtcatactcccagtattgcccaagccaaagagcaatctgctgtgggatcaggagcattctgcacttcgaggggttgatttcacatgttccggagatctacttccgtttcgaggggctccccaaacgtcaaaacgtgagtaggaacggcctgctatcaatgatatttcgccgttttggagacatgtctacttaacgaccagccccttgaaacggaggtagacctccagcaaacaccaaatcagcccctcgaagtgcagaatgacccttcaccaacgagttttctctgcgctttgcatttttgaggtctactttcaaaatgaaaagaccctctgcggtggaatgaatgcagagggtctcgtggagctgacggtagtcgaaaccgcgacctcttcgatgcgaacgaagcgctctaccaactgagctacagccccttggatgttactttgctccgcaaagcaactcgcacaaatataatacggggtgcagtcaaacgcaattcgggcaaggtgtcggcagacagactattttcccaaaaatctggaagaacgcacactgagcacacagcagtgcacattttccagacaagagccgaaatagtctgaaaaacgtatgccagctggctggtcgaatcaatcaagccaatccagccgcaactgcactatgcctatgcccccagcacgtgcaacaccttcttctcgttatagaacgcgaacacaatgccgcccaatccacacagcacagccgcgcacacggcggcgatacggtagcccgcgccggatgccatgccgatggtggacactccggtgaacagcaacatggccacggactgccccattttcatagcaaaagtacgagccgcgtagaacatgccctgacgatcttggcccgtggtcttggaactggcatcagcgatattcgccacgatggcctgcggcaggatgccgaatgcagccatcggaatcgcacccaccactgaaagcgtcagaccctgggccatggccggcatgaaggcgagtacaccggagccgagtgcaccggcaaaggcgaacgcgcaggtgaaaatcacaaaagcgataagcaacaagcgctttttgcccacacggttagccaggatattgaccggcagatagaacagcaccgagacaccggtcatgagtacaaagtagatggtcgtggtggtttccggcagtttcagcagactggtcacgaagaacggcaggccggtctggaacgtggtgatggccacccagtagaccacgtcggagcatacgaacttgcggaattcaccgtcggaaaaggtctgcttcagggattcaatggtcgattcggaggtgggctgcgagttgacgtagtccttctcgcgaatggccagcggcggcacaagcatgcaggcgaacgccacggcagccatgatggtaaaggtcacgcggatggcggtgatgcgccccatcatcggcacgaatgcgccccaaatcaccggcgccacataggcgatggcggtgccggccacccaggtgaaggagatggcggtggagatggtcaactgctgcttggaatcgtgaccgagctcggcgatgagcgcgttgtacggcgtgcagtagaacgtgagggcaatgtagtagccgataacagtgacgaacaggaatgccgcgttgacccaactggtgccgttgatcggactccagaacacgagtacggtgaccacggcgagcggcagggccgcgaatttcaggaagggcatgcggcggccggctttggaatcgcagcggtcggacagggaggccacggccgggtccacgaaagcatcaaagaatcgggcgaatgcggtgatgcctcccaccacggttactagcccaagcaccacgagaccctgcggcacgaacacggtctggccttgggagatggtctcctgatcgggctggtagaagtagacgagccagttggagatgatgccggaaagcagcgcccagccgaactggccgaccgcgaaggcccacactttggcaatgggcaaatccttgatagtcgattgcaacgagccaccggacacattcgttgcacttaccgctgttgcattgtccattctcataccctccgaatcaacattgacacagtgtcaagattcagtatacaccgcacagcgcagcgccttgcagccgcgcagccacacaccctacgatagtaggcatgacaggcctaaccgagcaattgccgcacaccgccgcattccccaatgccttgggaaccggcctgctgttgcataccgcgagcgcgctgggcggtgacctgcaccagcacatcgaagacctcatttccgattacgaaaacgtactgtctcgatttaaaggtgactcaattgtgggtcagatgcgcgtggccacgcacggcggcacattcgattttcctgactggacgatgaatctatttgacctgtatgaccacttgttttccactaccaatggggcgattgacccatgcgtgggcgaagatctgattcggctgggatatgacaaatcatattcatctgtgaacgaacccaatgccgctgaacacacaggtgcgattcatgggcgggccacatggaatcacgccatcgagcaccatggcacaacgttggttacgcatggcccggtcgcactcgacttcggcgcatgcggcaagggctatctggtggatctgattgcggaaaggctgggggtggcccagagcgacctccgatatgtcatcgacgccggcggcgatttgctggtgcacacgagcgaaccaatcaccatcgcccttgaagatccctccgacccggctaacgccgtcggtgtggcagagatcagccaaggcgcgttctgcgcaagctcccccagccgccgacactggaccgatgccgccggccatcaactccaccatctgctcaacgccatcgacggtgtgccggttaacagcgtagccgccacatgggttgccgcgacgccgccatctttggctaccgcccaagctgacggccttgccaccgccctcttcaccaccccggccgcccagctgcgcgcacactttccattcgaatgcgccatcctcaccgccaaccgctccgctgcccagtctcccgattttccgggcggctttttcatgcgatagttcagccgtcagcccgccaacgcgaactggctgttgtacaaatcagcgtagaagccatcagcagccagcaactcctcatgcgtgccgcgttcgatcacatcgccgtgattcatgacgagaatcatgtcggcgtcgcgaatcgtggagaggcggtgcgcgatcacgaaggaggtacggtccacggtcaacgcgtccatggccttctgaatcaactcttcagtacgggtatcgaccgaagatgtggcctcatcgaggatcagaatcggtgcgtcctgtaccattgcgcgggcaatggtgagcagctgcttctggccggcggacagtgacgaattctcgtcgagcacggtgtcgtagccgttcggcagcgacatgatgtagtggtgcaatcccacagctttgcatgcgctgatgatctgctcatctgtaacgcccggcttggagtaggcgatgttctcgcgcacagtgccattaaagatccaggtatcctgcagcaccatggagaactggtcgtgcacattccagcgcggcacggacttggtgtccacgccgtcgatggcgatcgagccaccggcaatctcgtagaagcgcataagcaggttgaccatagtggtcttaccggcaccggtcgggcccacaatagcaaccttctgaccggaggagacagaagcggagaagtcgttgataatcggcttgccggcctcatattcaaagcgcacgtgactgaattccacatcgccgtgcacctcatggccttgagcgccaagcagcgcctgcttgccggattcgtcagccatttccgactcttcgaggaatccgaatacgcgttcagatgcggcggcgcaacgctgcaggttctggaacgcctgcgcaaactgcgagagcggctgcgtaaacaggcggatatacatcatgaacgccacgatcacgccgaattcgatctggccgtccatggcgagcgcggcacccaccacgcacaccaccacatagccgaaattaccgacgaagttcatcagcggcatcatcagaccagacaagaactgcgacttccagccggaatcgtacagatccgcgttgtagcgctcgaaccgacgaatagaatctgcctcgccgttgtatgccttgacgatggtgtgaccggcgtacatctcctccacatggccgttcacatcacccaacgcgacctgctggcgggtgaagtacttttgcgaggccttcataatgaccatcatgatgatcaggccgatgatgcttgaaccgattgcgcacagcgccatgatccagttgttgtagaacatcatgaccaatgcgcccacgaacagcgtcgcggatgtgatcagcgatccgagcgactggcccagcgtctggccgatagcgtccacatcgttggtgacgcgagaaagcacgtcgccgtagctgactttgtcgaagtaactgagcggcagcttgttgatcttcttgctgatcgactcacgcaactcctgcgcagtgcgctgcgtaacggtggccatcatccagctctgaatgtagctgagcaacgcgtagcccacatacagcaccacaagcagccagccgatacgagcaaccgcgcccatgtcgatggaattgagcaccggcttgccatgcactaccgcaggcagacctttggtgatctcattggtcatgtctttgagcttgtccgggccgataatctggcagatggtgccagccgcgcccagcacaagcgcgacaatgatggcaggaacgtatttgcggcaaaagcggacgagtttgcccatgactttgccgaaatcctgtggtttttcgaccgcacctccgcggcccataggtcctcttggcattgtttcttaagtcctttgtctcttggctcccctctggaggggagctgtcacgaagtgactgagaggaggcttcagagaccaccctcagtctcgctatgctcgacagctcccgccagcgggagccatctaagttacgcagtcagttccgattcactcagctgggattcggcaatctgtcggtacacttcgcagttctcgagcaactccttgtgtgtgccttgtcccacaaccttgccctcgtcaagcaccacgatgcgatcggcgttcatgatcgtgccgatgcgctgggccacgatgagcttggtggaatccttggcttcctcggcgagcgcgtctcgcaccgcacggtcggttttgaagtcgagcgcagagaacgagtcatcgaaaatcaggatttccggatgacggtagacggcgcgggcgatggacagacgctgcttctggccaccggacacgttcgagccgccttgtgcgatcggcgaatcgaatccgccgtccatgcggttgacgaattcgctggcctgggccacgtcggcagcggccttgacacggctcatctgttcgtctgtcaacttgccgtcgttggcggcatcagcggccagctgaagcgcctcacgcttacggccggcgggagtagaggtatccgcgagttcgaccgcgtcgttctcgccgggcttgtcgccatagctgatattgccggccacggtgcccttgaacaatacggagcgctgcggcacgtagccaatcttgtcgcgtagggcgaccatgtcatagtcgcgcacgtccacaccgtcgacgagcacttgcccggcggacacgtcgtagaagcgcggcacgagattaatcagcgacgacttgcccgagccggtagagccgatgaacgccacggtctggcccttctcggctttgaagttgatgccctgcagcatggcctcgcgcgaatccgggtaggtgaagctcacgttcttgaattccacagtgcccgtctgcccggtctttgcgatatcggccgcgcgcttggtgccgtttttcacaatcggctcggtgttgagcacttccatcacgcgctgtgcggacacgtcggcgcgcggccaaagcacgaataccatgctcatcagcaggaagctcataatcacctgcacggagtagctggagaacaccaccatgttggagaacacggtgagcttgtcggtaagctcggcggcctcgatcaggtaggcgccaatccagtagacggcgagcataaggccgttcatcaccgtgttcatgagcggcatcatgatggccatggtgcggttggtgaacagctgcgtatcggtcagatccttgttggccttggtgaatttggactcctggtagtcctcggcgttgtaggcgcgcaccacccgcagaccagtgagattctcgcgggccacgaggttgatgttatcggtgagcctctgcatggccttgaacttcggcatgaccagtgccatgaggattacgacagcgaccagcagaatcacaaccgctatggccgtggcgaccgtccattcgaagccctcgccggcaatcttgcagacagcccacacggccatgatcggcgacttgacaatgagctgcagacccatggtgatgaacatctggatttgcgtgatgtcgttggtggagcgggtgatgaggctggccgtagagaacttgctcatttcggccgggccgaaggattcgaccttacgaaattcgagcgagcgtaggcgctggccgaagctggaggccacgcgcgccgcgatatagccggtgatgatggcgcagcagaccgagccgagcgagaccagcagcatcttgccgccggcgacccagatgtccgccattgcgctgcccggcgtctcgaccagggtggtgatgtctgacatataatcgggcagttcgaggtcgaaccagatttgcccgacgatggacactaaggcgataagcatctgaccgatctccgctttggagaggtatttcatgatgcgaaacattggtttccccttgtgttggttggttcttgggttattaactatttgatttatggattgattgagttatcgatacttattgattcacgatgtcttaatagttttcatcatttgattacttacaccgtaagatattacgcgcaattctgcatgttcgctgcgagcatcatcaatcatgcttgccgatcagccctcagcatgtttggccgccatgtgctccaccacgcgcttatcccgctcggcaaacgccccccgcacttgctcaggggtaggacgcggctggccgggatggcaaatcgacatgtacgtggtgaattccgaaagcaaatcaacgaattcgcgcgtgcgacgctcccccatctgcgagaagatccagcagattgcggaacgcatctcatcaatcattcgatgagactcctcacgcccggaatcagtaaggctcacgcggatgatgcgccgatcattagaatcaatgtcgcgcgtaatccagcccttcttttccaatgatgacagcacggtggagatacggcctgagctagcttgaagcgcagtcgccaactgcgacggcgtctgggtgcccttgagggacaactcccgaagcacgaactgctctccatgggcgccgcgcgtgaattccctctgcattttcgaacgattgccccatacgctggcatacagctcgccgaccgcttcctgctcgaatcccatatcgaagcaccatccatttcacgcaccatgcggcagtgcaccgcaaacatcccaaagaatatctcacaccataaacaattcaccattgagagtaatctaggcagatccgtcgtcccagctgttcacgagaccacaaaaacgatagaacacctgtaaaaaacgaatcaatacacagcacctatacattgcaacgattccgggctacatatggggtcaagaaagagctggcacggaagccagaccaccgagggggcgggaatcatgattcgaggaatgaatctatgcggcattgctggatgcacgcatgaggctgaggaagcgggctgtgcagcatgcatttcacatcggcactagtgcacggggcattgcgctaccctggcagcggtcgtccgtcgcatagctgacccatgcgcgacgcccttctctaaggctgagccgttgttagacgactaaaggggaaatagcgccacaactgaaccatccattgcgacgtcactcccctcggccgaatacctgtatatcgatatcgtctactccagatcacgcgtgaaatagaccacgtcgggacgcctacatattcttctccgacgagacaagcggcaccaagaccgccggcatcggacgcatttacgaattgacggccgcggatatcctcacgctggaccatattgacttcaactatgcgttcaactacccgtgcgcgttcagcctgttctgcacctgcccaatcccatccaagcgcaaccatttgccgtttgcggtcacggccggagagaagacaccaaaggaatatcagtactgatttcagcatttgcttggcgcccttctgaagaggggagctgtcttcgttagacgactgaggggagtcccggtgccaccgcgactcccctcagtctcgctacgcaatccagctcccctcagggagggggagccaaaaacctactccttatgctctagcgcggccttcaaatcacgactgcggtaacgctcgcgcaacagcgagaagccaccgaagccaatcaaccacaccaagccggcaatcgcggaattgcgcgtatcgtccgccaagaacagcgtcagataaataaacacgaagaacacaatcgccactgtgttcagcaccttccatgcaggcatcacgaaaccgtccgggatgaagtcgtccgaacgacggtacttccggtgtgccaccagcgtcagaatgtaaataaataggaacaccgcggaactggcagacgagaacagcacgaacgcaccggaaacacctggaatggcgttaacaatcggcgagagcagaatcagcactgcagacaccagaattgcgcgcgccggcactttgcgatcggaaacctgcccaatcttattgagcatcgggctcggcgactcttcggccagctggtacaggtgacggccggcggaatacaacagcgaattgagcgacgaggacgcggcggtgatcaccacgaagaacaccagggcggacgcccagttcagcccggcgtactggaacaccatgatgaacggggaggcgaaggagccgtcctcgttcggcttgaacgaggtccacggcacgatgcacatgatggccacgagcgcgcccacgtagaagatgagcacacgcacgatgatctcgttgacggctttgggcagcacctcacgaggattcttggtctcggagacggtgacgcccacgaactcaagcagctcataggcgaagaacaccatctggaagctcatgaggaaggccatccagccgttcggggcgaacgagaagccggcgaacaggttgtcgagtccggcgtggcccgccgggctcacatgatccacgccatgaatccgcgcggccgggtaatggtagccgatcacgatcatgaccacggcggtgacgatcatcgcgccgatcagcgtgatcttgatcatcgagaaccagaactccacctcgccgaacaccttgacggcgatcagattgacggacaccagcgacaccaggaaacacagctcgatcagccatttccaatgggtcaggtcgatgccgaacgtgtcgaagaaggtgatgaagtacgtggagacggccgtgatctcggtcatgcccagcagcacgagcgcggcccaatacgtccagccggcgaaatgcccccatccgttgcccaggtagcgggtgatgaaattgatgaaggtgtgctggctggggtcgcggtacatcatctcgccgatggcgcgcatcaggaagaacatgatgacgccgaccaggatatacacgaagacgatcgaggggccggtcagcgagatcgatttgccggagcccaggaacaggccggtgccgatagtgccgccgatagcgatgaactgcacatggcggttgctgaggcctcgttccatcgcattggtctgatcaaggctctcgacggacttgagcttgctcccggactgctgcgcgttaccgttcgcattcgtatcggccatactgatttcgtttctcttctctgccgctcggccctgttcacgccgactacggcactcgttcaatgcaagttcaaactgtatcaccgatagatgtcgcgaaaatcacccagctcacgaacgcacgtgatgataccgcgaacattaggccaaaaagttcaattcatcaccaaaaaattgaactttctccatcttgtcttctcccccccagtcagcttcgctgacagcccctcatcagagggggctcaagcaaggtcattccacggacttgagcgaactgaccggctcaatccggtcaagcaccgggttggtgaacagctgcaccagcagcgcgaatgccaacgtgaccgccacagcaatcgcatagctgtaccaatgcacttccacttcaaagtacagtgacggcatattcagtgcagccgtcagaagcccgccaatccagcgaccgagcggcaatccgactaccactcccatgccggtcagaatcatcatctcgcgattcacgtagttgtgcacttcacggtcatagaagcccagcaccttaagcgtggccatctcgcgtacgcgctcggatacgttcgtgttggccagcgtaaacagcaccaccaacgccaatccgccggcaagccccacaatcagcgccaccacggcggccatcaaatcgaatttgaacgtagcctccagatgcgcacaactcacggccttcaccaccgacgattcctcacccagccgatccgcatactcggcctgttccccatcgggacccttcagtttggcaagcatcgcgttccaagtcagagcggaagactcaccatccgagacagatgagtcaatgccacgtgccgcaaatttctggtcgtacagccgctcactgatgtacacatcggatccgatgaggttgcgcaccaccgcggcgacctttatcttagcgcggctactaccgccgttgctcacggtaacggtatcgccagtgtgcacgcccaacgaattggcagcggattgcgccacaatcacaccactgtcatccagcgtcacagtgccgccacctgatgcaccgaagaagttaggcagtccaaaccacccctcatcgccggcctcttccaaggtgaccatatcgttcaatttgttcagcgaattattgggtaccgccatcaactggatggtttcgctttcctgagcagcattgctcatctccgcactatccacgcgcaagttcaacgtttcggtggtccgcccatcctttttgacctgcttgcgcatcgcggccgcatcatcgtcattcgacaccaccatcaagtcatattgatagatctgcccatactgtttgacgccgatggtgtccacggtgtcgttaatcgcaaatccgcagataatcagtgcagtgcagccggccacaccacccacggtcatcaacaggcgcgacttgaaccggaagatattgcgtgcggtgaccttgcccaagaagctcagcctgctccataccggcctgatacgttccagcagaatacgggcgccggcctttggcgctttcggtcgcatcagcgcggcaggtgtgtgccgaatttcgctacgacaggcaagtgcggtggccacacccacaccaaccacgaacaataggatgccggcggtgccgtacccccagtcgtattcaagccgcacgtccggcaatatatacagccctttaatcacaatcagtaggaatgccgggataccaaggaacccgaccagcaggcctatgccaccaccgactaggcaagcgagcaacgcgaacagcaagtatcgcagagaaacgaccatgccgccatagccaagacccagatacgtgccgataagtccgcgatcttcttcgaccatgcgggtcatggtggtcaagctcatcagcacggcgaccagcaagaacaccaccgggaatgcgcggcctatggactcgatggagctgacgtctgacttgagcgaactgaacccatcgattgaggaacgcgtctgcacgtaccagcgcgcgttggccacgtcgtcgatacggcgctgctgtttggcgaactcgctctccgtctcgctgcgtttctcatccagctcttgttgggcatcctccagctgctgtttgccgtcctcaagctgctgttctccgtctttcagctgcttttcgccctcttcaagctgctgtttgccgccggccagttgcgcggcctgcgcttcaagttgcgccgactgcgcttccagttgtgcggcattcgattcgagctcggctaacttggcgttgagctccgcttctccggctgcagcttcctgttctttggccgttaactgcgcattctgctggtccaaggcgttctgcgcgggggcaatcgtgccatccaaggtttgctgcagttcggttttttgcttgatcgcgtcgctgcgctgcgattgcagttcattccgtttggcatctaactgttgtctcagcgcactgatggacggcacgtcgggcacggtgattcccacactggcgagcagctgtttcacagtctgccatgtggatgaatcgacatcgatattcggatcgagctgggatagcagatcatcggcttgctggataagctgcagcatctggtcaagttgtgccacaccttgatcgatttgcgcaatgccttgttcgaccttgctccggttggcggtcagctcagcccgcgcggcatcgagttgttgcctggcgctggtgagttgggttttgccggactcgagctgtgcgcgggcaccggctatctgctgacggccttgtgcaatctgctgacgcgcggaagcgatttgcgcgcggccttcggctatttgccgctcgccgtcagtgatggaggctttgttctgttcgagttgcgttcggctctctgcgagcttcgtctcgttggcctccagctcagcacgattaccgtcgatctgctgctggccttcgtcgagttgcttgagtgcatcggccttggctgcatcgagtgtgttctgggcgcttgtgacgatttgttggcggcgggctttctgccgctgggtttgtatctgactctcgatgcggtcagccacggttttgattgcggcatcgtagtcatcggagaacgtgtcatactcggacgcgcctgcgaccgcaatggatattgccgtgtatacgttgccggtcacgccatcactgggcgcaaagaacacataatcctcggacgaggtggaccggaacgcggtcatgccggaatagccggctggattgttgaggtcgcttgggtcaagcactactgcggtaatggtgagttcggtggggaactgcggggactgctctttttcgttgttgctcgtggtggcgtcttccgcagcacccacggtgtccgtatctccatcagagcttttaccggagccgctgttgctcttatcctctgcgcccgccagaacggttgaggatgcggaccgcggcgtcacagtgatgtcatcaccaatctcaagcccactgtcgttgaggaactgccgcgtaaccgccacttcaccggccttgctcggcatatccccttgctgcagatacggctgatccaaaccttcggtgccgatttcctgcatggtgacggttttcttcgtgcctttcaccgtagcagtcaccgtctgcgagcgctccggctgcacggtttccacaccttcgacgcgacgcagcgccgccgcatcgtcactggtcaaaccgtaggtggacagcacctgcaagtcgtgcagtccttgctgatcgtaaaagcggcttgcagccagaaaggcatcacggcaaccggcgtagatgccggtcagcacggccacaccgagtagggtgatgacggcgatagacacgaatcgtttccagctgcgcagccaacaacgcaaggcatctttgacaaacacggcggagacgctggatccgcgatcatcggattcagattgtttcacgggacgtttcacagattggcttctctgtttcacgagatgtttcacaggtcggccacccgggaagccggtatgagaatgccttgccgttgccataagaaccgcctaccactcgatgtctgcgatgggctgcggcgcagtattgatttcctcgctggtcacggttccggaacggaagtgaatcaccttgtgagccatcggcgcgagcgcggaattatgggtgatgatcatcacggtcattccctcgtcgcggcagatatcctgcaacagctgcaacacttccttgccggtctcataatcaagggcgccggtcggctcatcgcacaacagcagcttcggcttcttggcgattgcacgggcgatggagacgcgctgctgctcgccgccggacagctggcccgggaagttattcatgcgctcccccagtccgactttgcgcagcgtttcagccgggtcgaaatggtcgggacaaatctgcgaggcgagttccacgttctccagggcggtgagatttggcaccaagttatagaactggaatacaaagccgacgtcgttgcggcgatacgtaatcaagtctcgcttccgcaagcccgtgatatcacgctcgccaaccaccacacggccggaagtcgcggtatccataccgcccaaaatattcaatgccgtggttttaccggcaccggattgcccaagaatcactgtcagctcgccctgatcggcggtgaaacttgcctcatcaagcgcgcgaatcgacgtgccgccagaagggtattccttgaccaccttgtcaaattcgatatacgccatcgagcacctccagcgatttcgccgcggatggcttgcaatcgcagccaccaaaatcccgtcgtagtatccattgtaaaacaatgcttttagccactcacagaatccaatgggagtaagagccccactcccactacgtaactgcccaaagctgcgcaatgctccctcagcgaagcacccacccactcaaccgaaaaaacatcccgttcacggcccctcagcgaagcagatgttcgaacaaatcgcggttttgccccactgagagcccgtcagcgaagcaaatcccccaaccaatcgaagaaccaccccgtccacggaccctcaacggggcaaatcccccaaccaaccgaagaatcgccccgctgatgccaactcagcatggtctccgcacggtcttgtggaaccaatcggcatacaataccatcgttgagcataatcgctgacggactacaccgccgcccgcggcttacgagagaagaacaacatgagcactactgacgcgcctaagaagccgcgcgaaaccgacgatgtgccggtacccgcgaccctacgcaaatcattgaaaaatcgccatatccagctaatcgccctcggcggcgccatcggcaccggcctgttttacggttccagcgaatccatcgccctagccggcccatcgattctgctggcctacctcatcggcggcttcgcaatcttcatgattgtgcgtgcactgagcgaaatgtccgtcgaggaccctaaggcgggcgcattcagctactatgccacccgctactggtccaagcgcgccggcttcatctccggctggaactactggttcaactacattctcgtttcaatggtggaactggccgtagttggcagctttgtgaactactggttcccggcaatcccgacgtgggtctccgcagccgtgttcctggtgctcatcaccgctgcaaatctgctcggtgtttccaagttcggtgagttcgagttctggtttgccattatcaagatcgtggccgtaatcgccatgattatcggtggcctcgcagtcatcatcttcgccctgcctaccgcctccggcatcaaggcaagcttcgccaactggttcaccgtgggcggtggtttcttcccgaacggactcatgggccacactgataatgggtggaccggcctgctgatggcactggtcgtggtgatgttcagcttcggcggcaccgaactcatcggcatcaccgccggcgaaaccgaagatccgaagatcacgattccgcgtgccaccaacgacatcatctggcgaatcctcgtgttctacatcggcgctttgggcgtgatcatggccgtggtgccgtggaacaccatcgatggcaagtccagcccgttcgtgcagatcttcgactccgtgggcatccacgcagccgccggaatcctcaacttcgtgtgcctgaccgccgtgatgagcgtctacaactccggcctgtacgccaactcacgcatgctgtactcgctggccaagcagggcaacgcccccgcatacctcggcaagctcaactccaagggcgtgccggtggccggcgtgctgacctccgccgtgattaccgccatcgccgtggtcgtggtgttcgtgtggcctgaattcgcgttcaactatctgatgtcgattgccaccatcgccggcatcatcaattggacgatgattatgttcaccgagatgaagttccgcaaggtggtggaagccggtggcgctccggaagactccgacctggccggcaagtccgggcaggaggcgctcgacgcgattcacttcaagctgccgtttgccaaggtgaccccatgggtggtgctggtattcctggcactggttgtggtgttgatgtgcttctccgccagctaccgcatcgctgttatcgccggcgtaatctggctggccatcctcttcgtggcataccaaatcactcaggcaaagaaataatcgcccgatggcaataagaaaaggccgctgttcctccgcagcggccttttcttattgttgaagatacggcttgaagacgcgctcggtaacggggatgtggagcatcagcatggtgccgtagccgaggatcaccaacaggaacaagcctccgggcatatagaaccaactgcccaccagcaacgccacgaacacagcgtccacgacgacaagcgccgcggtcatcgcgatatgggaaataccgaaaataaaggcgttctttagggtaccggccacggtgttctcaaaccgggcctgcaacgcgaatacccactcaaagccgatgagccagatgatggtaagcgcgaacttgatgatgagcagcggggtgaattgcagcacaatccacgaccaggccaaagcgatcagcaccaccaggaacggcagccacagcaatgtggccttgacgaaattagccttgaatgagcggaagtagttggctgtgacgcctttgccctccccctcgatggagcgacggcaagcatcatggccggcagtcagagccgcaccgacggtgataatcggaatggatgtgaccagcatcagaatattgacccatacgccatcgatgagattgctccacgcgcgcatgaatttcgaatccggtgccagccagttcatcagttcactccttgtgccgctcggctcccctcaaagaggggagccagattgttgggattcagcctttcactgcgcccgccataactccactcacaatatacttctggcataccaggtagaagacgatgatggggatgattgccagaaccaggcaggccatcatggctcccatatccacagaaccgtaaccgcccttgagatactgcacagccaccgaaatggtcttgtacttacctaggtcgagcgtcaggtatggcagcaggtagtcgttccagatccacatggcttcgaggatggccaccgaaacaatcgacggcttcataatcggcaccacaatctggaagaagatacgcggaacggaagcgccatcaatcatggcggattcctcaagctcggccggaatgcccttgatcacaccggtgaagatgaacacggccagaccggcgccgaatccgaggtacacaatgcacagaccccatggggtattgagcttcagcatgtcagcaatcttggagagggtgaacatcaccatctggaacggcacaatcatgttgaacaggaatagagtgtagagaagcttggccgcccagttgttcacgcgcacgatccaccacgcgcacatcgaagtacacaccagaatcaggattaccgagccaaccgtgatcagcagcgtccaaccgaacgaggcgaagaactgcgtagtctcaacaccgcgcacatagttttcgaatcccacgaacgccttgcccgccggcaaagagaacgcattcttggagatgtatgccttttgcttgaaggagttgatcaacaccagaacaatcgggaagatccagaatagagagacgacggcgaacaggacagtccacaacgcgccgtgcttcacaggcttgttctcgttcatcaggctgccacctccttgctcgtggtgagcttgttctgaataagggcgattaccgcaaccagaatgaagaacagcacggccttcgcctggccgacgccctcccagcccatacggccgtagaaggtgcgggtgatgttcagcgccaggccttcagacatattgctcggcgcaccattagtcaatgcgaggttctgatcgtacagcttgaaaccgttggtcacggtcaggaaggagcagaccgtgatggacggcatcatcaacggaatgatgatacggaacatggtctgccgtccattggcaccatccacggccgccgcctccagcacatcggtgggcagcgcctgcaagccggcgatatagatgatcatcatgtaaccgatttgctgccagcacaccagaatgaccaaaccccagaatccgtaggatgccttataggtcaaggcgcggccccagtgggccagcacgccgttcagcagcagcagccagatgtagcccaagataatgccgccgatcaggttcggcataaagaacaccgagcggaacagcgtggagcccttgatcgccttggtcagcatataggcgatggcgaaagcgatcacgttgatcacgatggtggtcacgatggtgaatgcagtggagaaacccaatgcgtgcaggaattccttgtccttcagcgccttggtgtagttcttgagccctatccattcgccatcggtgacggtggtgaattcgcagaagctcaagtagacgcccatgatgaagggcaccaaaaacccgatgatgaatgcggcaaacgtgggtagcgcaaacagcgcccaccaccggcgtattgccttgcccgccatgctgatcatgactttcctcctccttgagtccgcaacactgcactgcatcgtgcgccgagcgcggagttcaactcaattccagcccgtcaagcagaacacacgttcgcgaatcccgccaatcaagcctaagcttcatggtaaacactcgacaaccatatgtcaaacgttgtcatttacagcgtttctacatgcaactacatcccatcagagcaattatctttcacttcacaaaatagctaaattccaacgtttctgcataataatagactatctgcaaacgtttgtaatacaatcgttgtcattgcgcaaattgcccaatcaccatgtacactggagccagttgtgtccgcttcgcgttttgcaaggcaaaggggctgttatgaccacaagtatccaagatgtcgcccagaaggccggcagaaggccggcgtatccatttccactgtgtcacgctcgttcaccagaccggatctggtctcgactaaaacccgcgagcgcgtgcttgccatcgccgacgaactcaatttttccctgtcccgttcggcagcggccttgaaatcaggccgatcactgcgcatcgcggtactgatgagtggtcacattcgcctatggttcaccgcttcagtaattgaggggctcaacgaagtgctgcatgctgcgggatacgatatttcggtattccaaatctccagcatcgaggaacgccgcgaattctttgaaatgctgccagtacgccgcaacgcggatgccgttatcgtggtgtctttcgacatcgacaataacgaaatcactcagctggcctcggcggatgtgccgatcatcggcatcaactcggtcgatcctgaagtgcgtgggttcaccgccgccgtcaacatcaacgatgtacagggctccacgctagcggctcgccatctgatcaaccttggccaccgcgatattgcatatatcagcaccgaccgcgatgtgtcgctcaacttctccgtgcaaaaccgattcggcgccttcacggaatgctgccgcaacgagggcatcgaaccgcaggtcatcgtctgcaaggtggatgatgccggccgttaccaaatcagcgatgtggtcacccaactgatgagtctgcctaagctgcccactgccatcgcctgccaggaagacggcattgctctgccgctcatgttccagctggagcgcaacggtctctccgtgccgggcgatgtatcgcttatcggctatgacgacagcttctacaccgacgacatcggcctgaccacgattcgccagaatccagtaggcatggcccgtaaagccgcgcacatgacgctcgacctcatcgaggaaaagcccgtcgacgaaccgtacgtcgtggcgccagctcaccttgtggttcgttcctctaccgccaagatccgctagccagaacccgctagcacaacagccggccagcaaccaaacgccaagcaacactgaaggccaccgcccaaacggacggtggccttcagtgatataggaaaggagacacacaaggtggagtagggaggtaagcgcggcgccccggagaaggaaattgggtagggcgccgcagattcagttatcgaggttgatcactgatgccgactggaatcagtgggacgcctcgtactcggaagcccagccgtccacaaaggcggtcttgacggcgtcccagttgccggtgccctgagcgtactcgagcagggcctgaccgatcttgttcttccactcttcggacggcatcatggtgaagttccaagagacctgggttttaccggacttctgatcctcaacagcggcctcggtcagcgggttgtcgctcttgacgtcatcgaaggtcttgaacggcgtggtgaagcccatgtcctgagaaagggccttcttgccggtgtcggaggtaatcacccaggacaggaagtcctcggtggccttcttgtcggcatcagaagccttgtcgttgatgcaccagtagttctcggaaccggtggccaggccctgcttctcctcgcccttgacaccgatgtaaatcggcatcatacccacggattcggccttcatgccggccttctgcaggtcggtccaagcccaagtaccgttctggtagaaggcggcctcgccgagcgcgaactcggagttggcgtcatcgccggtcttggcgctgagctgagtgggctcagtggtggaatcagtgatgtacaggtcgaagatcttcttgtagttcggcaggtaggtgcccttgatcttggccggctgctcggtgacgttgtcatccttgaactcgtagtaaagcggcaggttggccaagtgtgtcttgaaacgccagtcagagctggagtcgaagccggcggaggtgaatgcacccttgatgccgagctcgtccttgcgggactgcatgtcgtcggcaactgccttcagggtatcgaaattatcgatttcgtccatggaagtggccttggctccgtcgagggcgaagtacttgttgaggatgtccttgttgtagatcaggccgtaggtttccatcacgtacggcacaccgacaaccttgtcgccatccttgagagccacatcctggttggtgagctccttgtacacatccgtgttggacatgtcggcggtgtacttcttccagttctggtaaccgaccgggccgttcacctggaacagggtcggggcctcggtcttggcaatctcagacttcagggtctgctcataggtgccggatgccgcggtctggaccttgacctcaacgcccttctccttggtgtattccttggccaaggcggcccactgatcagccgcctccggcttaaagttcaggtaatagaccttgcccttggagtcgtcgccggaagtggagcttccacaagcggcaagggttccgagggacattgcagcgatggccgccactgcgaccgctgacttcactgtacgattcatcatcgaacctttctctttcatcgtcgacccgcccgatctccggtcggccagagtgccgttagcagcaccctcacgactatcgacatgacctattgtgcaacggttcgcgcttttttgcaaacgatggcattatcggcgcgccaaaaagtgctacaaaagcatatacagttgaccaatttcccgataaatcagtcggtttccaccgacggcatcaatgcaagcgttggcaacaatgagagcgctaacatgcaaaatccatacctcatgcgaggccatttactccgttgcgcaacacgccgaagctatcgtttgcagaggtgatgacgcacacgccccgtccgctcacggctcaaaacagaacgcagtcactgcatttgcgccaaagaaacgtcaagcctgcccgctacggctcagctcaggcattccaccgttcgatgacgttatcgcccttatacacgctcagcaccgagtaatgcgcagtatccaatcgcagcagacgcgcgaattgcggatccacgttcagccattgcgaggtcaggatacgcagaatatgggcatgcgcaaccaatagcacgttccgccccgactgcagcaacggcgtcacttcttcgatggcagtcctggcccgcgccgcgacctcgtccagtgtttctccagctccggaatgcacattgacctgctcaccatccggcaaagtatccacccaatcgccctccagcgtgggggttagcgagcgcgggccgtcacgccacacatcccaagagaacccactggcttcgctcacctgttgacgggtacgcccttcggcacggccataatcccactcggcgatgccgtcgagtatgccatgctgtgcaaaacctgcgagttccgcggtctggcatgcgcgtttcaacgggctggagaacacacactcagggtcaaaaccttcggggaaggcctcgcgcaatcgcgccccagcatccatagcctgctgcctgcctacctcagtcagagggatgttcgttcgcccggtatgctgcccggattcactccaaaaagtttgaccatgtcgcagcaataccaagaaccccgccttgccgcaagatgcatcaacagccacagtgccgtccatgtgttgttcgctcatgcctccactctagtctgcacagcttggcaactccaccgaacatcccatcttttgcgattagactgatagtcatgagtgatgaaacgaacaccggtattgcctctgacgccgatcgcgttgtcgagggactgcaccgcatcgatcagaaggtggacgacttgcgcaaccaacgtctcaacgaccccgactctctgggcgacaagctcgtcaagtcggcagtgccggccttggctggcctggttgcgggcaagctgtttcagatagcctggaacaagggcgccgcgcgccgcaatgtgatcaaaggactggctgccgacgcaccgcaaggcctggccatgagcttggcatttgccgccatctcagcggcattcggcgcaatagtttcgcagttgtccaatcagggctctcaagcgtttgtcgagcgacgccaccgcaaggcttctcgttaagcgcctgaaccgctggcaccaacgtctcactatgcatatttcactgtgagacaaccgacatcccctatgcacacgagccgtgcgacaatacagtcatggctaccaatgcaactatcgaaaccctgctgaatcgtcgttccatccgcaagttcaaggacgagcccattgacgacgacgccactgccactctggaaaccgtcgcacagcacgccgcttccagccggttcctcaatgactggtccgccatccgcgtcagcgatccggcaatcaaggcccgcctcgccgaaatcggcaaccagccgtatatcgccacagccccgctgctgtacgtgttcgtcatcgacgagcatcgcaacgcgcgtatcgcccaacgcaagggcattgacccgacctctgacgaattccatctcaagtacagctatcgcttcactcaggcccagaacgacgccgtgctggctctgcacgccatggagaccgcggcctactcgctgggtctcggcggcgtgattctcggctcgctgctcaatgacatccccgctctgatcgatctgctcaacctgccggaatacacctatccggtgctgggtctggctctcgtcaagcctgatcaggagcccacgttgaagccccgcatgccgcgcagcatgcagttctttgacaacacctatcctgccgacgacgatggcatgctcgagcaattgcctgacttcgacaacaaggtgcaccagtattacgatttgcgccaggccgatcggcccgtggatgcgttcagcgatcaaatcgtctcggtgagccgtcagggcgtcagcggcaaaacactgctggacaaggctgcagctcaaggtttccagctggataagtaatgcgccagcactacccagtgtccagaacatgcatccgccattcggacactgggtggccgttttttcgccttgcagctgcgctttatccgataaatcacgagcggccggaatagactgcattatggctggattggagcgccgaagacaagagaccgagagggggctggatgcgcacggtatggcaagtatttctgcgtgactgcaaacgcattctccgcaatcccgttgccgcagtggtgacattaggtgtcgcagtactgccttccctgtatgcatggttcaacatccttgccaactgggatccttattccgccaccggcaacctgcaagtcgccgtcgccaatgaggaccgcggcaccaccaatgatctggttggccatctcaatgccggcaagcaggtggtcataaagctcaaacataacgaccaactcggctggcggtttgtgagcaacgaagagcaggccgtacagggcgtgcaaaccggcgactactacgcggcgattgtgctgccaaaagacttcagcgccagcctggtcgattcgttgaccggcacctccaaacaaccgaagataaagtactacgtcaacgagaagaagaacgccattgccccgaaaatcacggacaccggtgcaaccaccattgacgagcaaatcaactccacattcgtaaccacggtgagcaacaccgttgccgccgccatctctcaagcgggagacgacctcgaccaagccaccaatagcacgcaaaacaatgtggtcgccgatctcggcagtgtgctctccaccattgccacggtgcaggacgcgctcacggatctacgcaccacattggatcggtcagacacagctctggccgacgcccgcagtactacggcctcattgcagcgcagcatcaccgcagcgcagcaagcctcccagcaatccggagcgttgctggccgagacacaggacggctcgcaagtattcgcggcctcgctggtaagcgcactggacaccagctccgcacaactttccggactgacggtgaacgtcaacaatgcagccggtaccatcaatcaatccttcaacactgcacaaaattccgtcgacactattaccaacgccctgaacagtccgctcgacaaaaccgccacttccctcgacacgttgaaagacgcattgaataaggccggcatcagtgcagacaccactgatccgaccggcaagcgcatctgggatcacatcaacgcggtcgatgacgccatcagcacgcagcaagcgaaaatcaacacctttcacgaagacaccacccgtttcatcgactccggcaagagcgccaccaccaatctttccggtgccatgagcggtaccgccaccggcggcattgcggcgttgaacaccgcacggagttcgctgaccggcacagtgatgccgtcacttacttcatcgctgaacagtttcgccgcgctaaacggcacgctgggcggcacgctgacctcgctctcaggcactcttgaccagaccaatggcctcttcgaccagctgtccagcaccatcacccagaccagaaccaccataggcagcgcgcaggattccttgaaccagatcatcgatgacgtatccaccgtgcgcaccgatgttgccacgcttgatagctccgccgtctaccagaagatcagggacacgatgcacttggacgataagggattcggcgaattcatgggttcgcccgtcaccctgaccaccaaggtcgtgtacgccatcgataactatggctcggccgtcaccccgttctacacgaatctggcgctctgggtaggcggcttcgtgctcatcgccatctataagcttgaggtcgaccgcgaaagcatacgccggatcaacgccaagcaggcctacctcggccgatggatgcttctggtcaccattggttttctgcaggccatcattgccaccgtgggcgatttggtcctcggcatccagtgcgagcacccattgctgttcatcttggccggcatattctgctcattcatctatatcaatatcatctatgcgctggccgtggcattccgccatatcggtaaagccatcgccgtgattctggttattgtgcagattccgggagcttctggcctctaccccatcgaaatgatgcccgacttcttccgcaaactgcacccgtggctgcctttcacctacggcatcaacgcgatgcgcgggccgattgccggcacatacagcaaccattactggctcgacatgctgcacctgttctggtatctgccagcagcgctgttcgtaggccttgtggtgcgccgttatgccatgaatctcaacgcattgttcgaccgccgcttgggagacactgatctgatgatcaccgagcacaacagcatggtcaacgaacaggtcagcctcgcatccgtgttccgcacggtttccgacagcaaggaactcaaggccatcatcacccgccgtgcacaccggttcttcgccagatacccaatgatgattgttgccggcttggcactgctgactattcttccgttcgtgttcctcatactgctgttcgtcacacaggaaaaaatcgcgatgcttacgtcgtggattctgtcaatcatccttatcgacgcatacctgattgtggtcgaatacactcgcgaaagctacgcgatgcaactgggcgtcagtgcgatgaacgccgacgaattccgcgatgtgatgctcaacggctatgtatggcgccgcttccgctcccatggtcggcatgaggcagcatctgcggaatccgctgtggataccgacccggatatcggagaggtcaccgagcaacttacgccgttcgagcgaacgggctccactgattcatcggattcatcgaaatcatcggagtccaccatcaccgacacaaaccccgcacagggaggtgcacgatgaagctcatctggaagatcttcgcacgcgatgtgcgccaatccacgcgcaatgtaatcgcggtgatcgtggccatgggattggtgatcgtaccggcgctgtatgcctggtacaacatcgccgccagctgggatccatacggcaacaccaaggcactcaaagttgccgtggcgaacgtcgacaagggatataagtccgatctcatgccaatcaccatcaacgttggcgagaccgtcaccaataccctgcgcgccaatcatgacctcgactggcagttcgtggacaaggacgaagccatcgacggcgtgaattccggcgcctactacgccgccctcatcatcccgaagagttttagcgccgacatgatgacagtgttctcaccaaccatcaagcacgcgaaaatcgaatactacctcaatgagaaaatcaacccaattgcaccgcatatcaccgatcaaggcgccagcacggtagccaccaccattgaccagaccttcgtcaagacactcgccagcgtggcacttgatctggtttccaatgtgtccaactatgcgcaaagcccgcagatggcgcagtacgtcaacaatgccaccagccatatctccaccatgtcctccaggttgactgtcgcggcttcacaaatggattcctatgccaacctcttaggggcggccaacggcatcattgattcgaccgacaaattgctgggatccactggctctgccgcaaacaccgccaaaaaggcattgaagcaaacccgcgacggagtgaacagtctggattccgcattgtctggcgccgccagtggcgtcgaaaccgccctgcagcaggccggagcttcatacgatacggtcagcaagcagcttgataccgcatttgccagtattggctcgcaatccgaccaaatatccggcacgctcaccgacatgcaaaccaaagtgaacgaccaatccgcaagcttcggcgcctacgcttcggcattgcgcgaacttgccggcaagtcgtcatcactgcccgccggtggagatacgattgccaagcagctcaatgccgcagccgaccaagccgcgcagacgcaacaagatctcaagaatgtcgccgacgatttgggccgtgccgcacagagcctggttgatggcacagcggacaccgaccaaacactcaaagacatcaaggcacaaatcgccgccgcaaaacagtcagttacacaggccgcgaacgattatcaaagcacgctgaagccgcagctcaacaatctgactgcatcgatgggtgacgtcgccgatcaggcaagctcggttattgatgggctgtcttccactgtcaacagtgtctccaacctgtccggcggcatatcggccagcctgagagacattcaaaccacgctcaccgacgccgcaggcaacctgaaccattcggcaagtaagctggacgatttgtccgcacagctttctggtatcgccagtggtagcagtactgatctggattcgattaccacagccgatcctgatgccattgcttcgctcttgtccgctcccgtggcggtagatcgcataccgctgtacccagtggccaactacggttccgcgatggctccgttctacacgattctgtctatctgggtaggcgcaatcatcctggttgccatgatgaaagtctctgtttccgatcatgagaaggccaagattcttgggttcggcaatgacctgcctcttggctcggaggtcggcttgcgcgaggcaatgattgccggacgggttgccggcccggctgccgcattggacgtgttgacgaagcctcgtgccgattcgcctggtaatgcgcggcagtttggcctgcacttgtatcaggagtacttcggccgatatatgctatttggattcctggcactgttgcagggcacactcgtatgcctaggtgacatgttctatctcggcgtgcaatgcgagcatcccgtgcagttcctgatggtcggatggctgtccgcattggtcttctcgaatatcgtgtacacccttactttgtcgtttggcgatatcggcaaggcgattgctgtggtattgctggtgatgcaggtagcaggatccggcggcaccttccccatcgagacattgccttcattcttccaggcagcctcgaaatggctattgttcccctatgcagtggacgcgatgcattcggcaatggccggatcatacggcatggaatattgggtctccatgggcaagctcgcccttttccttgtgccttcgcttctacttggcctactgctgcgcaggccggtaatacgattcaatgattggattattcgcaacctcgagagcaccaaggtgatgtgaggcaccgaggcaattactgcttggtggcgatgttgattcccgttcctggaccgtgacatgtcgttcggttcgagtggcaattgctattgagcactactggactgcgatgttgcttcgccatcttgagagagatgacatacggctgccggagaaggaaaactacttccgccgaggcttataccctttcttgcagctatgcggcttaagctgctggttcagcggcacatggcgatagctggattgcggatcacggtgcgtcaaatgccagcacccgcagtattcgcagcggtacacccatagctcggccccgcgctcaatcagactttgatcggcggctcgctgggcttgcgccttgtcgtgatacatgatcttgttcgacgtagcgcaacgtttcggggtgaagtagtgcataacggaatatcagtatagttggaggataaaaaaatgcccccggccgtgtggtcgggggcattcgtaagttggatgcggcggcgtgctactctcccacaccctgtcgggtgcagtaccatcgccgtgccaggccttagcttccgggttcggaatgggaccgggcgtctcacctgggccatggccgccgcaaatcttctgttatacggtcagacgctggggtctgccggcgtgtggcggcctgggaaccggatagcggacgcgatgcgttgattcgtcttgtgttcatcccgtgctcattgtcgtgcgggatggttcgcagcaggatgcttgcgttccaaccggggttggattgttgtgttgcctttcgtccgttagtaccggtcggctccacccctcgcggggcttccacgtccggcctatcaaccacgtgttctgcatggggacttcaaggacccgtagtcctatggaatgcttatcttggagcaggcttcccgcttagatgctttcagcggttatcccttccgaacgtagccaaccggccgtgccactggcgtgacaaccggcataccagaggttcgtccacccaggtcctctcgtactatgggcaggcctcctcaacattccgacgagcgcagaggatagagaccaaactgtctcacgacgttctgaacccagctcgcgtgccgctttaatcggcgaacagccgaacccttgggacctgctccagccccaggatgcgacgagccgacatcgaggtgccaaaccatcccgtcgatatggactcttgggaatgatcagcctgttatccccggggtaccttttatccgttgagcgatgccgcgtccgtacaccggcaccggatcactagttccgactttcgtccctgctcgacccgtcagtctcgcagtcaagctcccttgtgcacttacactcgccacccgattgccaaccgggctgagggaacctttgagcgcctccgttactctttgggaggcaaccgccccagttaaactacccgccaggcactgtccctgaccaggatgactggtcgaggttagacatccaatgcgaacagagcggtatttcaccttgcggctccaccgcggctggcgccgtggcttcgaagccttccgcctatgctacacaatccacaccgaatgccaataccaaggtatagtaaaggtcccggggtcttttcgtccttctgcgcttaacgagcatctttactcgtactgcaatttcgccgagctcctggtcgagacagtggggaagtcgttacgccattcgtgcaggtcggaacttacccgacaaggaatttcgctaccttaggatggttatagttaccaccgccgtttaccggggcttgaattcaccgcttcggccgaagcctgacggatcctcttaaccttccggcaccgggcaggcgtcagagcgtatacagcggcttgcgccttcgcacgctcctgtgtttttggtaaacagtcgctaccccctggtctgtgccacccccaaaagctccacgggcaagccgcttcaccatcgggggtctcccttaaaccgaaggaacgggagtgatttgccgagttccttgaccaggattcgctcgatcgctttggtattctctacctgaccaccagtgtcggtttggggtacgggcggcacgccgcctcacgccgaagcttttctcggcagccgggatcaccggatatcgcgccctgcggcgcccatcatcgcacctcgcccacgcgccccacggatttgcctgtgggacgggctgcgtgcttgaccacggaagaccacctccgcggccggctacccttctgcgtcactcccgcgctgacctactaccgttacggtcccaacaggccagggcatccggctcccgaaggagacgtaagcccggacccggaggttagtactcgcggattcggttttgtcggttgcatgccggtacgggaatatcgacccgttcatccattcgactacgcctgtcggcctcgccttaggacccgactcacccagggacgatgaacgtggccctggaacccttggtcgtccagcggacgggatcttcacccgtctttcgctactcatgtctgcattctcactcccatgcggtccacggcgggcttgcgccgccgcttcgccccgcatgggacgctctcctacccagtagcaaagctactgccgcgtcttcggtggtgtgcttgagccccgctacattgtcggcgcggaaccactagaccagtgagctgttacgcactctttcaagggtggctgcttctgagccaacctcctggctgtctatgcgactccacatcctttcccacttagcacacgcttggggaccttagacgacgatctgggctgtttccctttcgacgacggagcttatcccccgccgactcactgccgggatacgcatcacgggtattcggagtttggttgctgttggtacccgatatgggcccgcaagcatccagtcgctctaccccccggatgtaatcgatccgacgctgcacctaaatgcatttcggagagaaccagctatcacggaatttgattggcctttcacccctagccccaagtcatccccccggttttcaacccaggtgggttcggtcctccacacggtcttacccgcgcttcaacctgctcagggctagatcatcccgcttcgggtccaggacacgcgactcaaacgccttttaagactcgccttcgctacgcatacgccacacggcttatgctcgccacatgccactgactcgcagactcatttttcgataggcacgccgtcaccccacaagggggccccgacggttcgtaggcgcatggtttcagagactgtttcactcccctcccggggtacttttcacctttccctcacggtactcgttcgctatcggtcagacaggaatatttaggcttatcccacggtcgggacagattcgcacgggattccacggggcccgtgctacttgggagacgcgatcgccagaccatgcgcgttcgggtacggggccctcaccctctgcggcccggtattcaacccggttcccctggcacatggttttatgcaactgacggccggcccgtcggagccggcaaacgcgatccctctacaccccgcgcgcaacccccgacgggtatcacacgcgcaaggtttggcctgatccgctttcgctcgccactactcacggaatatcctttcctgcaggtactgagatgtttcacttccctgcgtaccccccgcacacggcggtaccggcccatgacggccggtgggttcccccattcggaaatcctcggatcaaagccctgttggcggctccccgaggcatatcgcagcctcaaacgtccttcatcggtcctgtctgccaaggcatccaccatacgcccttgcaggcaacacgcaccacacggtgcgcatggccgcaaggatccttcctagcaaattcccagacgacaaatcatcacactaaaatgatcacaaaacgatcgaaacaaacactaaaaaatagagttcgattcgaaatcaacagcaagaacgaggaaccaaaaggaaaccccgtcttgctcgcgtccactatccagttctcaagccaccacgcaccaccacgccgtccggacgggaccagcccgccatcaggcacgatgggcatcgaatcgcgccaggccaaagcctggggtggcgatccgggagcccaaaagcgcatccgcaccactcccgcggaacatcccacgacggacgaaccgaaagcccatgatctcttccacaccagcagccccaggccgccgcgactgccgcggcgtcggggttcgcaccgccggacgaacatccggctgcattctccgtagaaaggaggtgatccagccgcaccttccggtacggctaccttgttacgacttagtcccaatcacgagcctcaccttagacggctccctcccgcaaggggttaggccaccggcttcgggtgctgcccactttcatgacttgacgggcggtgtgtacaaggcccgggaacgcattcaccgcgacgttgctgattcgcgattactagcgactccgccttcacgcagtcgagttgcagactgcgatccgaactgagaccggttttcagggatccgctccagctcgcactgtcgcatcccgttgtaccggccattgtagcatgcgtgaagccctggacgtaaggggcatgatgatctgacgtcatccccaccttcctccgagttaaccccggcggtcccccgtgagttcccggcataatccgctggcaacacggggcgagggttgcgctcgttgcgggacttaacccaacatctcacgacacgagctgacgacgaccatgcaccacctgtgaacccgccccgaagggaaaccccatctctgggatcgtcgggaacatgtcaagcccaggtaaggttcttcgcgttgcatcgaattaatccgcatgctccgccgcttgtgcgggcccccgtcaatttctttgagttttagccttgcggccgtactccccaggcgggatgcttaacgcgttagctccgacacggaacccgtggaacgggccccacatccagcatccaccgtttacggcgtggactaccagggtatctaatcctgttcgctccccacgctttcgctcctcagcgtcagtaacggcccagagacctgccttcgccattggtgttcttcccgatatctacacattccaccgttacaccgggaattccagtctcccctaccgcactcaagcccgcccgtacccggcgcggatccaccgttaagcgatggactttcacaccggacgcgacgaaccgcctacgagccctttacgcccaataattccggataacgcttgcaccctacgtattaccgcggctgctggcacgtagttagccggtgcttattcgaaaggtacactcaacacaaagtgccttgctccctaacaaaagaggtttacaacccgaaggcctccatccctcacgcggcgtcgctgcatcaggcttgcgcccattgtgcaatattccccactgctgcctcccgtaggagtctgggccgtatctcagtcccaatgtggccggtcgccctctcaggccggctacccgtcgaagccatggtgggccgttaccccgccatcaagctgataggacgcgaccccatcccatgccgcaaaggctttcccaacacaccatgcgatgtgatggagcatccggcattaccacccgtttccaggagctattccggtgcatggggcaggtcggtcacgcattactcacccgttcgccactctcaccaccaagcaaagcctgatggatcccgttcgacttgcatgtgttaagcacgccgccagcgttcatcctgagccagaatcgaaccctccacaaaaaaacctcgtgaaaagcatccgaacagatgactcacaaaacaaaaattgacgagcacgtccttaaggaaggacgccctcaaaaaacctcacccctcatcaaaccctcccgggtacccagccaccacacaagcggccaggcgaggaatgaactggcaatcattgactataaagaagtagtacaaacacgctcttgagttctcaaaccaccaccactcacccaccttgtaagctcttccagagaagaaccactcgctgagcggcagcaaggaaataacttacacacatttgaggactcatgcaaatcgagcgcacaaaaagaagcccaaatcgttgaaacgacaggcttcgcccggcgtgtcgaaatcgacgcttcgcacgtctctatgaacagtgtaggcctgttgatgcacgaaaaaaagtattcaaaatatattttcattggcgtgtcgccgacctatttccgcccaacgtggctcagtaccgcgtccacaatgtagaaagagcccgttatgtggcatatcgcaataaccgcatacattattttcggtgtctgatatttcggtagatacgtgaaaattggaatcgtgcagggataagcacaaatctcccggtagatgggcttctatgagtgttcagccgttgtactctccatgcacttaatatccactttatgaagctgaactgaccgtggcggcatgaaatagtcaatgcagacgtaccgcccacgctggcggttcctgagagtatattggccaagctttctcggattaaccgataatgcacattatgttgttctcagtcttccgttattccaatatgcgatgaagaaaaacattcctccgcctggcaaagttttgcgcgcatataaggaaagccccggtggattgaatccatcggggcttcctgtaagttggatgcggcggcgtgctactctcccacaccctgtcgggtgcagtaccatcgccgtgccaggccttagcttccgggttcggaatgggaccgggcgtctcacctgggccatggccgccgcaaatcttctgttatacggtcagacgctggggtctgccggcgtgtggcggcctgggaaccggatagcggacgcgatgcgttgattcgtcttgtgttcatcccgtgctcattgtcgtgcgggatggttcgcagcaggatgcttgcgttccaaccggggttggattgttgtgttgcctttcgtccgttagtaccggtcggctccacccctcgcggggcttccacgtccggcctatcaaccacgtgttctgcatggggacttcaaggacccgtagtcctatggaatgcttatcttggagcaggcttcccgcttagatgctttcagcggttatcccttccgaacgtagccaaccggccgtgccactggcgtgacaaccggcataccagaggttcgtccacccaggtcctctcgtactatgggcaggcctcctcaacattccgacgagcgcagaggatagagaccaaactgtctcacgacgttctgaacccagctcgcgtgccgctttaatcggcgaacagccgaacccttgggacctgctccagccccaggatgcgacgagccgacatcgaggtgccaaaccatcccgtcgatatggactcttgggaatgatcagcctgttatccccggggtaccttttatccgttgagcgatgccgcgtccgtacaccggcaccggatcactagttccgactttcgtccctgctcgacccgtcagtctcgcagtcaagctcccttgtgcacttacactcgccacccgattgccaaccgggctgagggaacctttgagcgcctccgttactctttgggaggcaaccgccccagttaaactacccgccaggcactgtccctgaccaggatgactggtcgaggttagacatccaatgcgaacagagcggtatttcaccttgcggctccaccgcggctggcgccgtggcttcgaagccttccgcctatgctacacaatccacaccgaatgccaataccaaggtatagtaaaggtcccggggtcttttcgtccttctgcgcttaacgagcatctttactcgtactgcaatttcgccgagctcctggtcgagacagtggggaagtcgttacgccattcgtgcaggtcggaacttacccgacaaggaatttcgctaccttaggatggttatagttaccaccgccgtttaccggggcttgaattcaccgcttcggccgaagcctgacggatcctcttaaccttccggcaccgggcaggcgtcagagcgtatacagcggcttgcgccttcgcacgctcctgtgtttttggtaaacagtcgctaccccctggtctgtgccacccccaaaagctccacgggcaagccgcttcaccatcgggggtctcccttaaaccgaaggaacgggagtgatttgccgagttccttgaccaggattcgctcgatcgctttggtattctctacctgaccaccagtgtcggtttggggtacgggcggcacgccgcctcacgccgaagcttttctcggcagccgggatcaccggatatcgcgccctgcggcgcccatcatcgcacctcgcccacgcgccccacggatttgcctgtgggacgggctgcgtgcttgaccacggaagaccacctccgcggccggctacccttctgcgtcactcccgcgctgacctactaccgttacggtcccaacaggccagggcatccggctcccgaaggagacgtaagcccggacccggaggttagtactcgcggattcggttttgtcggttgcatgccggtacgggaatatcgacccgttcatccattcgactacgcctgtcggcctcgccttaggacccgactcacccagggacgatgaacgtggccctggaacccttggtcgtccagcggacgggatcttcacccgtctttcgctactcatgtctgcattctcactcccatgcggtccacggcgggcttgcgccgccgcttcgccccgcatgggacgctctcctacccagtagcaaagctactgccgcgtcttcggtggtgtgcttgagccccgctacattgtcggcgcggaaccactagaccagtgagctgttacgcactctttcaagggtggctgcttctgagccaacctcctggctgtctatgcgactccacatcctttcccacttagcacacgcttggggaccttagacgacgatctgggctgtttccctttcgacgacggagcttatcccccgccgactcactgccgggatacgcatcacgggtattcggagtttggttgctgttggtacccgatatgggcccgcaagcatccagtcgctctaccccccggatgtaatcgatccgacgctgcacctaaatgcatttcggagagaaccagctatcacggaatttgattggcctttcacccctagccccaagtcatccccccggttttcaacccaggtgggttcggtcctccacacggtcttacccgcgcttcaacctgctcagggctagatcatcccgcttcgggtccaggacacgcgactcaaacgccttttaagactcgccttcgctacgcatacgccacacggcttatgctcgccacatgccactgactcgcagactcatttttcgataggcacgccgtcaccccacaagggggccccgacggttcgtaggcgcatggtttcagagactgtttcactcccctcccggggtacttttcacctttccctcacggtactcgttcgctatcggtcagacaggaatatttaggcttatcccacggtcgggacagattcgcacgggattccacggggcccgtgctacttgggagacgcgatcgccagaccatgcgcgttcgggtacggggccctcaccctctgcggcccggtattcaacccggttcccctggcacatggttttatgcaactgacggccggcccgtcggagccggcaaacgcgatccctctacaccccgcgcgcaacccccgacgggtatcacacgcgcaaggtttggcctgatccgctttcgctcgccactactcacggaatatcctttcctgcaggtactgagatgtttcacttccctgcgtaccccccgcacacggcggtaccggcccatgacggccggtgggttcccccattcggaaatcctcggatcaaagccctgttggcggctccccgaggcatatcgcagcctcaaacgtccttcatcggtcctgtctgccaaggcatccaccatacgcccttgcaggcaacacgcaccacacggtgcgcatggccgcaaggatccttcctagcaaattcccagacgacaaatcatcacactaaaatgatcacaaaacgatcgaaacaaacactaaaaatagagttcgattcgaaatcaacagcaagaacgaggaaccaaaaggaaaccccgtcttgctcgcgtccactatccagttctcaagccaccacgcaccaccacgccgtccggacgggaccagcccgccatcaggcacgatgggcatcgaatcgcgccaggccaaagcctggggtggcgatccgggagcccaaaagcgcatccgcaccactcccgcggaacatcccacgacggacgaaccgaaagcccatgatctcttccacaccagcagccccaggccgccgcgactgccgcggcgtcggggttcgcaccgccggacgaacatccggctgcattctccgtagaaaggaggtgatccagccgcaccttccggtacggctaccttgttacgacttagtcccaatcacgagcctcaccttagacggctccctcccgcaaggggttaggccaccggcttcgggtgctgcccactttcatgacttgacgggcggtgtgtacaaggcccgggaacgcattcaccgcgacgttgctgattcgcgattactagcgactccgccttcacgcagtcgagttgcagactgcgatccgaactgagaccggttttcagggatccgctccagctcgcactgtcgcatcccgttgtaccggccattgtagcatgcgtgaagccctggacgtaaggggcatgatgatctgacgtcatccccaccttcctccgagttaaccccggcggtcccccgtgagttcccggcataatccgctggcaacacggggcgagggttgcgctcgttgcgggacttaacccaacatctcacgacacgagctgacgacgaccatgcaccacctgtgaacccgccccgaagggaaaccccatctctgggatcgtcgggaacatgtcaagcccaggtaaggttcttcgcgttgcatcgaattaatccgcatgctccgccgcttgtgcgggcccccgtcaatttctttgagttttagccttgcggccgtactccccaggcgggatgcttaacgcgttagctccgacacggaacccgtggaacgggccccacatccagcatccaccgtttacggcgtggactaccagggtatctaatcctgttcgctccccacgctttcgctcctcagcgtcagtaacggcccagagacctgccttcgccattggtgttcttcccgatatctacacattccaccgttacaccgggaattccagtctcccctaccgcactcaagcccgcccgtacccggcgcggatccaccgttaagcgatggactttcacaccggacgcgacgaaccgcctacgagccctttacgcccaataattccggataacgcttgcaccctacgtattaccgcggctgctggcacgtagttagccggtgcttattcgaaaggtacactcaacacaaagtgccttgctccctaacaaaagaggtttacaacccgaaggcctccatccctcacgcggcgtcgctgcatcaggcttgcgcccattgtgcaatattccccactgctgcctcccgtaggagtctgggccgtatctcagtcccaatgtggccggtcgccctctcaggccggctacccgtcgaagccatggtgggccgttaccccgccatcaagctgataggacgcgaccccatcccatgccgcaaaggctttcccaacacaccatgcgatgtgatggagcatccggcattaccacccgtttccaggagctattccggtgcatggggcaggtcggtcacgcattactcacccgttcgccactctcaccaccaagcaaagcctgatggatcccgttcgacttgcatgtgttaagcacgccgccagcgttcatcctgagccagaatcgaaccctccacaaaaaaacctcgtgaaaagcatccgaacagatgactcacaaaacaaaaattgacgagcacgtccttaaggaaggacgccctcaaaaaacctcacccctcatcaaaccctcccgggtacccagccaccacacaagcggccaggcgaggaatgaactggcaatcattgactataaagaagtagtacaaacacgctcttgagttctcaaaccaccaccacaccagcccgaaggccattctcaggaggagaacctccgtgctgagcagcaagagataaacttacacgtagatgcgaatccgcgcaaatcagagcgcacgaaagacctaggaatcgacgtaattacgctgttccttcggcgtgtcgcgcagagcctattttgctctgttgaggccagaataacccctcaaatgtttctaaaaaacatcgaatccattatgtgactggcgtgtcgcgacagttttcggcccgttggcacatgttcatcttccggcaaccatcgcaggggcacatcctgcgatgcatccacactggccttatcttcaactgtcattcatgaatcgcgggtatacctataagcatgactaaaaagattgctgtattaaccggtgccggcatttcgacctcggctggcattcctgatttccgcggccctgatggcgtatggaccaagcaccccgatcaaatgagcgtatatgacattgacctgttcttgcgcaataaggaagatcgcgagtactcctggcgatggcaaaaagaatcaccggtatggaacgcccagtccggcgccgcgcataaagcgctggtcaaactggaaaaggcaggcatgctgactctgctggccacgcagaacttcgacgcattgcacgaaaaggccggaaacagctcagacgtcattgtgaatctacatggcactatcggcacttcgcattgtatgaaatgccatcaagaatacagcaccgcagatatcatggctcgcttggatgaggaaccagatccgcattgtcatcgcagattgaagtatcgcggtgatatgccctgcaatggcattatcaaaaccgacgtggtgtattttggcgaagccctgcctgagggcgctatggagaagtcctacagtttggcgaccaaagccgatgaactgtgggtaatcggatcgaccctcgaggtgtacccggcagcaagcatcgtgccggtggctgcgcaggcgggcgtgcctatcaccattatgaatatggggcacacacagtatgaccatcttgcaagccgattgattcatgaggatatcgccgtcgcgctgccgaagctggtaaacgaaacgattgcggagaacaagtagctactgtcggcgaagccgactgaggggagctccagtccgaagctcccctcaaagatgggaaccagattatcccaccttgtctcagtcggctccgccggcagtgacgaacaattcatgattattgttcagccacccacctgcgttccgcgctatctcccgccagcgggagatattggacatcagtagatgcgcttagggctaaagccagcttcgcgcagagccgcaaggatgcggtcaatatggtcagggccgttggtttcgaccgtgacaccaagagataccgcgttggtgtaatggccggaggccttgaactgatcgtgatccagttggatgacgttggcgcgctgctcggcaagcaacgtggccaccttgaccaactggcccggggtatccggcagctcgacctcaaagttcatgatgcggccgcgggcaatcatacccttttgaatcacggcgccgatggtcacggtatcgatgttgccgcctgacataatcggcactaccacatgcggaccagtggccgcagcgaacttgcgggaacgcaaattcagatgctcgagcgctgccagcgagacggcaccagcggcctcgaccaccaacttgtgcttctccagcatgagcagaatcatctcgttgatgtctcgctcggagacagtgaccaaatcatccaggaactcgttgagcaatgcaaacggcaaatcacccggatgcttgaccgcaacgccctcggcggaagtcaccacacgatcggcgggggatacatggccagatgccaacgaatccttccaggccggagaaccttccggaattgcgccaatcacacgaacatcaggtttgaaggtcttgatggcgagcgccacaccggcgccaagaccgccaccaccgagcggcaccacaacatcggtgacattcggcacatcttcgagaatctccaacccaatggtgccttgaccgcaaatgacctcgtagtcatcgaacggcggcacgtagatcatgcccttcgtctcggcgagttcggcggcatgcgctgcggattcatcgaacacatcaccgtagagcaccacatcggcaccataggccttggtggcatccactttcagcggcggagtaatctgcggcatgcagatagtggccttggcgccacgttcccgggctgcataggccacgccttgcgcatggttgccagcggatgcggtgacgataccatgagaaagctgctcttcggcgagcgaagcaatcttgttatatgcaccacgaatcttgaatgacccagtgacctgcagattctcaggcttcaggagaatctcgtggccagtcatctcgctcaacaccggggaaggaataatctccgtgtgacgggcagtgcctttgagtcgttcggaggccagcttcagttcggctgcatgatcacgctgcagcgccttcaaaacatccttttgttccatagctgctcattgtatggcgcggggacgccgaaaatgactattcatctcgttgacaagatacttcagagcaatcattggcgcagtcctaccgtattttccgctttcgaggggcggatttgaccgtttccggacgtctatctccgtttcgaggggctgcttaattcggtataccccaagtatctcgcattatttacgacggtattatgcggtttcagaccctgaactatttgagcaccagccccttgaaacggagatagacgtctggaaacggtcaaatccgcccctcgaaacaaaaataccgacttacagctggacggcagcagcctcccacgggtcaagctcacggttggcgagggagaccacagtgtgaggggcgtcgtacgtggagagaatgatatctggctcagtgacgccgccggcaatcagctcggtggattcacgcggcaagtcgacggttcggccggacagattaaccacaaccagcaatcgctcgttgccaagcgtgcgggtgaacgcatatacatgcgcgtcatccgcatcaatcagccgccactcgccagccgccacaatcgaactgttgtggcgcaaggcgatgagcttcttgtagaaggcatacaccgagtcaggatcgtcgaattcgccggccgcattgatttcagcatgattcgggttgacggaaatccacggctccgtcgctgcatccggtgcggtgaaaccggcataggcagaaccatcccattgcattggggtacgcgaattgtcgcgaccgcgcgcggcgatacccgccatcatcgattccggcgattgtaccttggcttcctcgaccctctgacgataggcattgagagattcaaggtcgcggtactgatcgaggctggtgaagtgagcattggtcatgcccagctcctcaccctgatatacgtacggagtgccgcgatgcatgtgcaacatcaggccaagcgctttggccgagcgcacgcgggattcctccgaggagtcatcgccccaacgagagaccacacgtggctgatcgtggttaccagtgaacaagcttgcccagcccacgttctccacagcagtctgatatccggccatgatccgcttgaatcccggcaaatcgagcggcagaggcttccacttgacgccatcacaatcaaaatcgacatgttcgaacaggaacagcatatccagctccccattggccggattggtgatgtgctcgttgcgttcggcggtgatgccgggtgcctcgccgacggtgaggaagccgtcacgcccgtcgaacacctcgcggcgcatctcggcgaggaactcgtcctgacgcggaccgtcggcacagaacgggttcgggctggagtagccctcctcccccaccggcaggtcctggagctcggaaccgtactcgccgggcagcttgccgtttgcatccgtgcgcttggagatcagggtgatgacgtccatgcggaagccgtcgatgccgcgatcgagccaccagttcatcatgtcgtacactgcacggcgcacggccgggttctcccagttgagatcaggctgcttcttcgagaactggtgcaggtagtactcgccgcgctccgggctgtactcccatgcggagccgccgaagtaggagccccactggttcggctcggcgccgggcgtgccgggctcgtggccggggcgggcgggacgccaccagtaccagtcggcgtgcgggtcgtccttgtccttcgacgcctcgaaccacgcgtgctcgtcggaggtgtggttgacgacgaggtccatcacgatcttgagtccgcgcctgtgcgcttcggcgagcagctcgtccatgtcgtcgagcgtgccgaacagcgggtcgatgtcccggtagtcggagatgtcgtagccgttgtcgtcttgcggggacctgtagaccggagagagccacagcacatccacgccgaggtcggcgagatagtcgaggcgggaggtgatgcccttcaggtcgccgaaaccatcgccgttcgtgtcctggaacgaccgcgggtaaatctggtacacgacggcgttcgaccaccacggattgggggtggcgccgttggtgcggatggcgtcgggaattattgcgcggttgaaagtagtcatcattggctccttattgatatctatattgctcgttgctcacagtctaaaaaaatggtgaattacattcccattagtgatctgcattggtgtgccggaaaataaatagcgccagttggcaatgcacggcccggtgcacgattcgtgcgttccagattgcatagcagcgattcgataaacggccgatccggttgatgtccgggcgaaaatagcatgccacactgggtctccggtgaccgctagacgattgtgcgtcatgcttccgtaccgtacaacgcagaaacgggtgattccacacctatgcgcacaaacacgtgccacacagcatgagaacaggcgtttctgcacccatgtggcacacgcacgtaccgcacaacacgaaaaatggccgaatcatgttcatgcggcaaatccagtcttcccaaaaacgttggaaatccgccatttcttgattccactcctcggaaggggcaaatggtggtctgccgcataacaacaaaagctccagtctccggcttgtgcggcagaaaaaaccgagcgctacattacctcgtgagtatgcggcctatcggccgcccgattaaggaaacagtcccactggggctgtttccttaatcggctcatctcgctcgacgctgtgaagtaatgtaacatcgagcactgcattacttcacagcgtcctgcaattacggactggcctgcggccagactcaatattgcctcgcgggctgccgcccgctcggagcggtcaacggaaagcccactgggctttcctttacttgaccgctcctctcatcactccaccgacgacccacttttgggcgaagatgtagacgatgaggatcggggccatggccatcaggtagctggagaaggccatcggatagttggtggcgaactgcgagctgaagacgtactgggcgagcgggatggtctggttcgactggtcggtcaggatgatcaacggcaggaggaagtcgttccaggcccacagtgcggtcaggatggcgatggtggcgttaatcgggctcatcagcgggaagatgatggtccagaaaatgcgccacgtggatgcgccatcgattcgggccgcctcttccagcgaaaccggaatcgaacggatgaagccagtggcgatgaacaggttcgtgcccaggccgagcaccgtgtacaggatgatcaggccgacctggttgtccaggtgcagggagcccatctgcttcgcaatcggcagcatgacgaccgggaacggcacgaacatggcggcgatgaagaagtagtacaggaagcggaagaagcgcttatccatgttgcgggccacagcgtaggccacgaaggtgttggtcagcaaggtgagcaccacggcggccaccgtgatgatcgcggagttgagcgcggccttcggatagttgaccttggcggaggcgtcggcgaagttgtgccactgccacgaggtgggcagggcgaaggtgccggcttcggccggagtcttcagcgcggtgacgatggtgaagtagagcgggatcagaatggtcaggctcagcacggccacggcggcggtcagccaccagttgatcttgtggtccctgcggaacttggcgggcttgccggacttggacggggtaactgttgcagtagtcatttcttatcctcccctaaatcagatctgttcctggctgcgggagatgcgcagctgcacgaaggcgatgatcgccagcacgatgaagaagagcacggcgttcgcggtctggtaggcgtactcgccaccggtcaggccacccttccaaatgaggtaggtgacggtttcggtggcggagttcgggccgccatcggtcaaggcgacgacctgatcgaaggtgccgagcgcgttcttcatggacagcacgaggttgatggtgaagaacggtccgatcagcgggaaagtgatcttccagaacttctgccagggattgacgccgtcgatggcggcggcctcgtagatttcatcgtcgatggtctgcaggccggcgaggtagatgagcaccgagtaggcgatgccctgccagacggcgaggaagacgatcgggatccagctaagctgctcattggtcaacagcgaggtggacagccacttgatgcccagcgccttaccgagctcgggcagagggttcatgaagatgtacttgaacacgtagccgatgaccagcacggaaagggtgtaggggatgaagaagatggctcggaagccattcttgaaggcgatcttcgagttcaacagcaccgacaggaacagggcaatcacgttgatcagcaccgtgataaggatggcgatgaggaacgtgaacaggtaggcgtggcccacgcggttgtcctggaagagggcgatgtagttcttcagtccgatgaacttgtaatcgccgtagccctgcgagttggtgaaggaatactttacgccatcaagaaatggcaggtacaggaagaaggcgaagataatggccgccggaaccaccatccagtagtaagcggggtccactttgcgggtggagaaggcggagaccttcttcttggcgggtttcttggcagcggacttagcggccggagcagcggtcttagttgcagttgcgtgtgacatgatgttctcctctcctaccgatcactcgaaggtcctggcttggaccttgtcccattcggtctgcatctggttcaggaaacggtcggtgttgccggaggtcaccatggtctgcaggtagccgccgatgttgatggacgaaggaatgtagtggtcgcagaagtcggccagtcggttttcctcgaagaacgggcgcacggtttccagcgcatcgttgccgaagtaggtgtccttcagcggcgtgatggcggactgggcgtcggcgtaggcgtcaagctgatccttctgcatgaggaattcgacgagcttcatcgcttccttggggtgcttggtgttcgcaccgatggtgagcatcacgtcgtcgccggcggtgaggatctgctcgctggcgtcatcggtggccggcatctgggcgaaaccaagttcgatatcggggttgatcagcaggatctgcgggatggcgtaggtgccgagcgggatgatcgcggccttgccttgggcgaagttctgcgtgccctgctggtaggtgacgccggtgtccgcagtggagtaggtgaagagctcggattccttctcgactgaggtcttccacagttcctggaacgtggtcttgccttgcttgagctcggtgtacttcgattcgggaaccagcgtgccggccagggaggcgagcggcgcctgagtggtccaggcgtcggccacggaaccctgcagcgggttgatgccggcgtccttgaaggtgttgagcatatcggtgaactcgctccaggtggtcggcgggttctccgggtcgagacctaccttgcggaacagcgccttgttgtagatgtagccggaggcgttgccggcaaagggcagaccatacaggcgcttcttggaggaatcggtggtctgcaccagattcttggcgatctcgaccatgccggggttgagggtgtccacgatgggttcgtcggtgaaatcgtagaagacaccggaggcggcgaagttgccgaagctgatgtcgccgttgaaggtgatcacgtccggcacacgattcttgacgaaacgggtgcgcagatcggtctgggcgttggcggaattgttgatattgaccttgatggtcgggttctgcttttcaaaatcggcgaccatggacttgaactggtcggcggcctcggacttgaactggaagaaatccagcgtgacggtgcctgcggtgctggagccgcagcctgccaggccgaagccgacggcgatcgcgcacaccacggcggcggtgcgcacggccagacgcttcagtctaggcgttgcatgtggggaatcggacagcatattgttgactcctttatctcttgccttccggcttcagcgccggcggctcttccactttcaaaagtaacgatttcgccatttcattcccagcgccagcgagcccaattgcgtaagaaacaaaaagcgcggtattttgtgattaacgcaataaataatgcaaagggggcttaagcatgtctgacgccaatgcgatcccgcaatggttttccggatccgagcatacgcatcgcgtggcggcagccatcgcccaatatgggccgattgcgcgcactacgttggcacagatgctgggattgagccagggtgcgctctcccgcattaccagcgatttgatttatgccggagtcatcgaagaactgccggctgtggccggaactacaggtaagctgcctgaacggtttactcccaaggagagctcggatcgtcgcggccggccgcagaccgcattggtattatgctcgaacgcacgcaccttcgtaggcgtcaaagtgcacggcacatccattgtgtcggccgccgtgaacgcgcatggcgaggtggtttccggccggcatgagataccaattggtgctgatcagtcggcagaatatgtgacatcgtcgatagccacgctggttcgtgaatgctctgatgatgtcgccgccaccggcctgcccgctcccactgccgtgggcgtagcggtcggaggtcacgtgatcgatgattccatcgtcacgttcgccccattcctgcactgggagggcaccacagatttaggcgcaatggtgtacgaggccaccggattgccatgtggcgtattcaacgatatcgattcgctgctggtggatgcctcctggttcgggccgggagtgggcgtggatacgttcgccgtagtgaccatcggcgtgggcgtgggctattcgctggctgtgcatggcgaaccggtcagttacccggacaagagttttggcctagtggggcatgtgctcatcgacccggagggcccgcgctgccccagtgggcatatcgggtgttcgcaatgcctgactgacgattcgattgcggaacagtattcggcgatcatcggccgcgcagtgaccttcgatgattttgcgcacgatgccagagcccatgtgccgcaagcctcccagctagtgcaccgcacttgcttccgattgggatcgctggtggccaccgtggcgaacatcgctatgccggggcatgtaatgatcgccggcgaatcggcatttttggcgaagcttggtaccgattcgctgcgtgacggcatccgcttctatcggcatagccaaactcaaccggtgaagttcacgattatggatcacgactggcagctctgggccaaagccgctgccagtcgtgtaatcgtgaagcatattgggtaggtcactccgccacagctttgaacagtactgcctgctgagggtggagggacgggggacggatgccgtagcgctgcagggcttcgccggtcaggactacgccttcttcgttccaccaaccgagggtgctttgaccattggtcagaccttcgaggtccaggcttgggtcgagcgggctaatgcgatacttgcgcttggggtcaaggccaggcagatgcacgggagcggcaggataggtctggctcgtggtcagctgggtgaagcggtagatggcagcattgcggttcggcatcaccatgccatcgaggcgcacggccggatcgctggagtcggcgtgcacgcaggtatcgatggcgaaccaatcacgatgcttcttgaactcggccacccacactgccagcttggcaagtgcatcgtccggctccttgagcaggttccattcgatgcccatgtgcccgaagaatgccatcgccatgcgcaattcctgactggtctcacgacgagtggagtgcgcggggctggcacccacatgctcgcccatcatggcaggcggcacaagcagtgatgtgtaacgctggatgtccgcgcgttcgaccggatccacgcaatcggacacccagatacggtcggcgtattcgaggataccgagatccacacggccgccaccggaagagcagctttcgatttcgagacccgggtgagcggtcttgaggcccttgaaaatctcatagacggcaatagtttgcgcgtgcacggccggacggccggagcggcgagaaccgggctcagtgaccagcttgttgtgatcccatttgatgtagtcgatgccgagctcgccgacgagctgatccatgcagctgtaaatgtaatcgaaagcttccggattggtcaggtcgagcacttgctgagtgcggccctgcagcggcagacggccggcagtgggcgaaagaatccaatcagggtggttgcgggccacgtcggaatcggggttgaccatttccggctcgaaccacaggccgaactccatgcccttggcatgcacataatcggcgagcgccttgagggacttcgggccatcgggccatacgtcctgagaaatctgccagtcgccaaggccggaggtgtcgtcgcggcgagaaccgaaccaaccgtcatccaccacgaatcgttccacgccagaagcggctgccttgtcggcgagcgccttgagcgtatcgaagttgtggtcgaagtacacggcttcccaggtgttgaggattaccggacggccatgcgagaacaagcgcgggtgtaaagaacgcacataggagtggaagcgtgcggcaatctcgttcagaccatcgccgaaggagccgaacagccatggggtttcgtaagagctctggccttcgccggctgcatcatcaagcgttacttcgccgccaaacagcagctcgccgccgccaatcacaccctgcgtgtacggcagtcgctcggcggacagcacggagttgccgctccagcccacgtgcaccgagtaggcctcaccatgctcgaagccgaagccgggaacgccggcggtaagcagcagagaagcgtcgaaatcagggcgacctgcgagctgcggcttctcaaaacgtccgacggtgagcggctgacgctgcgggctgcgttcgcgaagatggtggccggtggtggtcaggatttcggatgcggattcgggcagcgggaaaccgagctcgatcttgccgatttccagcggggcctcggcaccggcttctgctccgaacaggttggtcacgatggccttctgacgggccaaaccaccgggcagaagttcgagatgccattcgagttccacgccttgctcttcgtcgcgcgcagtgattgccacgccgggcacattggccgggccagtggtacgggcacgtccagtcacatcggtgtagctgtcgccggacacagcatcgaggctagcagccaccacaccatcgaatttcataccggtcacggtgaacttggggaagagttcgatgccgtcgcggcgcagcaccacacgctgctcgccaatccagctttcggcctgagtcggcaggatggacggccaggcggtgtcatcgagtgcaccggaaacgcgctgcggcttgagcgcatcgtacgcagcgagcaaggtctcaggattgctcagcgggcgaccccaatgaatgatacgcggcaggtcatcgccggcagcgaccagaccgattgccacgttggcatcgggctgtacaagatagatggcggtgagcgcggttccgtcagcggcggtaccggtgaaggtggcggtgttctgggccatagtgtctccttcgacgtatacggaatgcattgaactactgattgtgatggtagaagaagtagaatatgttgccttggtgccgcgtgttggatggatgaagtaagtatttgagcgatttaccgccgatgagcgaagaacgtgctgaggagagtctggcaatcggcttctgccacgccgccatgcacttcaggggcgtgaccaatatggggatcgcgcgggatatcccaaattgacccgcaagcaccgagcttggagtcccacgcgccaaacacgatggtgccgatatgggtttggatgcatgcgccggcgcacatcgggcaaggctcaagcgtaacagccagtgtgcaatcggagagattccacgagcctaatgcgcgggcggcctcacgcatggcaatgatttcggcatgcgccagtggatcgccatcggcctcgcgtgtgttgtatcctcgcccgatgatttggccgtcggcgttcaccaccactgcgccaaccggcacatcgccggctgccgcggcccttttggcgagctccagcgcgccgtgcatcatctcgtcatatcccatatgccccatatgaacgagtgtatgccgcgtggcttgcggccaccaacgactttcagcagatatgtcccatctggacgagtgcatggcctgccccgtgggacaagatgtgaatttggccggttttcgcattatgtcccacgctcctctcaatcggcgaaaagcatcatcctcaagaaatggcgacattccaacgtttcatgttttgggcttgtgggacataaagaatgtcaatcgattgatgttgctaatgggacacggtcaagtgggacaacacgaaaaaaacgccagtttccgcatcgtgtcccacgcaaaacgacatgacccaaccgcatgccacacgcgagatgatacgaactcagccacactcggcctgaagcttaatgtgttcctaacgatgctcatatactttgagtgataaaagaaagggagacactcatggctgtattcgagctcatcctgtgcattatcgcagcagtggtggtgagttcgttcgccagtcgtttcgtgccgcgagtgtccacaccactggtgcagatcgtgctgggcgttctggtcacctacttgccgttcttcccggatgccaagctcgatccggaattgttcatggtgttgttcatcgcgcccttgctgtatctcgaagcgcatgaaatcgacaaatcggcgctgctgaaaacgttggatttgagcctatccctggcgattggtctggctatcgtgacgatgaccgcagtgggattcacgctgcatgccgtatggccttcgattaccttggcttccgctctggccctaggcgcggcgctcggcccgaccgatgcagtggccgtgagttccttgggcaaagaggcttcactgtcccaacgtcagcgcagcgtactcaaaggcgaatccctattcaatgacgcttccggcatcgtcggcttccagtttgcacttgctgcagcattcaccggagactttgccgtgggccaagccgccggtgaattcgtgatctcgttctttggcggcacgctgttcggtctgctggtggccggatgcgccaactgggtgttcgagaccgtacgctccctcggttgggagaccaccaccacccgtattttgatggaactcttcctgccattcctgctgtatctaggtgcggaggaatgcaatgtatccggcattctggcagtggtggcagccggtctgttcatccgtttcgaccgtaccggagtgggcccgaacgtggcccgcacgaatatcgtgtcttcctccgtgtggggagtgttgagcttttccctcaacggcgccgtgttcatcctgctaggcatgcagctgccgcgagccatgcaggccagctggtccgacccatacatcagcaacaccgtgctcatcggcattattctgctcgtcactttggtggtgattgtgctgcgcttcctctggatcaccgccatgctgcgcatcgcccgcgacatgaacaccggcatgcgacgcaaaatgacccctgagcgctggaggtcggccgccgtgatgacgttcggcggacccaagggcaccatcacgctgtcgttgatgtttactatcccgtattacattgcgggcggcgcggcattccccatgcgcgacgaactcattttcatcgcctccggcgtgattatcgtgacattgctgctagccaacttcctactaccgctgctagctccgaaccgcaaccgcgatcccggcgcggagatgataccggtcaccattgaggtgctccgctccaccgtggaagaactgactggccgtatcacgcctgagaaccgacgtgcagtgcttatggttatcgaccagtacactaagcgcattggccgcttgcagcagcacatcggcgaagccgacccgcaggggttggagaagctgcaaatcgaggcattgcactgggagaaggaatttgtgcgcgaccgccttgccgagaccaaggcgcatccggcggcggattcagccacgcaggagctgaatgtggaagcttgcgagcgcatgcttgaccagatcatgaatacgttgcgccacacctccaccgatccgacttccggtcatgcggtatcgcagattcgtggacgtgcacgcatgttgcagcgccaagtgagcaactacgccaagcgcaccgtctcgaagattcgccataccacgccgctggtgagcgaggatcagatttttgcccgcacacgcgaattgcaggttgaagcgattcatcatgtgattgaccggctgatggacgagatgggcaacgacacctacaacaccgagcattgttcagcgctgcttttggattaccgtcgcgctgagggctcactgcaggcacggccaaatatgagcggcaccactgaggcaatcacgcaggtcgaagaggtgaagcgcgagagctacggtattgagctcagtgtgattcaggacatgcttgaggccggcgacatcaaccgtgcacaagcacgttcgctcaggcgcaatatatacgtcatgcaggttgacgccgattccggcatctaaatttcttggctctcccctctctgaggggagagccaagaatgctactttctcgtgattttgagggcgacccagacactgcggatgaggagcactgttaggtatgtggcgaacaggatttcgccagtgcgtggggtcatcgcctcggcaatccacgtgcccagtggcgcagtcaatgcggctacgatgccgataatcaatccgaccttggcatgcaccatgcgccggcgaacattggccaccgtagtggtgacggcgttcgggaacatggccaacaatgaagtgccgcgagcaatcagatccgaagcatcaaacagaatcgataacgatggcacaagaatggcaccaccgcccacaccaagcaggccggccagaatgccggcgattacgccgaataccaccatcaataggccggtaacgaggttcaactcaatcgaggagtcacgcgaaggcacgaatatgagctggctgagaatgacgaatgccatgaacaccacgaatgcccaacgcagcacgacttccgacaatcgggacagtagtagtgagccaatctggccgccgacaaacataccgatgaacaccagcaacgcggcaatccaatcgacattgccgttgaccgcgtaagacagcacgccagatactgacgtagggataatcgccagcattgaagtggcggccgcatgacgctgggtcaggccaagccataccagtgcaggtacgatgatggtaccgccgccgatgccgaacagcccagacaacaaaccaacaagcacgcccactactaccatcaccgcaatgccacgcggggattcatccacatggttttcttcagcactcacttcgctcatgggactttagtctatgaccggagtgtgtgcgggtctccgttgcgtctgattactgtacatggtgcggccgcatcgcttcatcaccacccagtgccatgaatcaggcaagtattacagcacgccagacgtgatgtcgttatccagcaaccactgacgcaaatcggcgaattcctcaagactcacattatggtcgaggccgcgatagctcttggttttgagccacgtatgctcctcaagccaagcggcagtagcgaataattcgtacttgggaatcacgccatcgtctttgccgtaggtgtagaacacgggaatatcgtaattggccaagcgatcgtcggcgggagcggtgccgggtacttgaccgggcgcgttgaaaccagacaacgatacgacagcacgatagcgttcgggattgatgcgcagtagatgcacggcgacgagaccaccttgcgagaagccgagcggtactacatcacggtcagcgggaatgttggcagccacccaccgatcgacagcagtggcggctgcatacgcgtcataatcaagatcatcgccgaccggcagagcgtcatggagccacgcgtagttgccgggcatttcactgtgttcgggagccttggcaagtgccagtgggccgcgcaacgctacaaaatcgttgtagggggcgatgaggcgcatgatgcccgccatgtcttcttcgctggagccccagccatgcaagcataggaataacggatgagtggggtgctggtcgaagccgccgcgcgaggtcacgctgtattccactgaaagcggctcgccaaaacgcccaggcacggcagtggattcacggccgattaagggctgacttgcattcgcttcgttgctcataccaccacaatatacggcgttcggctgttgtgaagtgctcaactggcatgatttcggtcacactgcggcattgccactgtccgtgccatctttggctgcggcgatggtttcgagggtgccaccccactgctgctgaagcgcggtcatattgtcggcctcgccgaacaccatccagcgcttgccattcagcaaacgccagtcgccttgcgtcttctcgttgtcggcatgctggcccaacaattcagtgatttcgcttttgattggcgcccggctcatcgcagccgaggcctcggagtcaaaggatacgaacgcaacacgcggatcagcacacatctgcacggtggtgatgccaggcagaccgcccgcatccaatccttgccacccgtccttgcacgcgccgccaaccgcccgttcaataccttgctccatttgtgcggtattgtctaccggcgctttgtcagtgacggcgggatgaatcaaaccctgtgggaacagtacgcccacggccacacccaccaccaaacaagccgcggccagaaccaatgtgacgatgccgcctgcgcccactcccccatgcgtggagtgacgcggcatcgtgacacgcgacgaaatcaccagaatcagggtaagtccgatcagcacagccgcagtgcccgcgatataccgacctcgcacattcaccaaaaagccgatggattcgggcgcaatctcatgggccgccgataagacagccaccactacggccagcaatccggtaattaatgcgatacgccgcaacaacttggatgcagggctatcgactttcagcttgatcgcacgccgaccagagccacgcccccgagaatactgctgttcgcggcgagcgcggcgcgaaccgttgtactgtccgtcgtcaaagaaatcgtaatcctcgttattacttgccatctggaccgccctccctgccgatagccccagtgtaccgccccaccgcgtgagtggtcgtcattccgcaggatgaatcgactaagcaaaaaagaaccccggcggggttaccgccggggagagaaaggagagagaagaagaaaggggttcaattgtcgggaactgctgcggctcctgatcagctcttcgctgacatttcttatataaccactcgattctgtgtctatctctgaggttctctgagaataacctgaaaattttgcgcttgggcgctgccggctactgtatcggctctaatactgtttccgcacggggcgctagactggggagcagtatttgttatgccgcaaggagttttcatgctgctgtccgaccgcgatattctcgccgctcagtccgctggtcacatctctctggatccgtggacaccggagatggtgcagcccgcctccatcgacgtacggctggatcgctatttccgcctgttcaacaatcacgcatatacctatgtggatcccgccgaaaatcagggagcgctcaccgaacagtttgaggtggcccctgacgaaccgtggattctgcaccccggtgagtttgcgctgggctccacgtgggagtacgtcaagctcgatccgactgttgccgcacgccttgagggcaagagctcactgggccgtttgggtattctgacccactcgaccgccggctttattgatcctggcttcgaggggcatattacgcttgagctgtccaatgtatcgacgttgccggtcaagttgtggcccggcatgaagattggccagatgtgcttcttccagctgagctcgcctgccgagcacccgtacggctctcaaggcaccggctcccattaccagggccagcgtggacctaccccaagccgctcctacgagaatttctatcgcgcgcacatcaaggactaaacgctacaacgcatcattcggccggcgcatgccggccatttgcttaccaccaaggagatgttatgaccaacagtgacggcggtttccaattcgacttccagcaccctgaagaaccatccaagccagtagtgcctccggttcccccagcacctgcgactcaggcaacacagcctgcgcagcccacacaacccgtatggccagccgcgcagccgacgcaggcattccaaccagtacagccgacacaagcaactcaagcattccagtcagcacagccgacacaagcaacgcagtcattccaacctgcgcaaccgacccagccaacgcaggctgtaccttcatatgacgcgactgcggcaactcaagcattccagccgattcagtttggacagcccacaaccccggcatacggtaccggcgccacttctgggcagaccgtcgccatgccagcagccccagcccaggcgatgcctgctgaagatatgcaggcgactcaggtatttcagccgtccgaagtaccggctgcggctcccgcacagccggcgacactaccgcccaccattccaccgctcgatcagttcgctgatgaagaagagcccgaagaacacgagcctcgtcatcaaggcggcggcaagaaaaacacgggcaaaaccgtcggcattgtcatcgccgtggttgtggtcgtggcgttgattgccggaggcttgttctggtggcattccaacagcagcaaggtgagccaagcggcggcgctagtcgactgcaaggcagcagccaagcagtatgattcggccaagaagaagctcaccaccgccatcacgaacggtcagaccagcgcgcagacgcccaccagtgacgtggccgacgtcaacaccatcaccacgttgaatcaagcggtgcaggatgctggcaccccggccgataccgctacctgcgattccaagctcggcgcagatgagttgaagaagcagaccgaagacatgcagagcaaggtcagcgacgccgccgataagacggatgccatcaacagcgccatcaaggccgtcaacgcttccaagaagacggcaaacaccaactcgctgaagtcgaacctcagctcggccgtttcgcaggctcagggcattctggacaactcggccggcaacgtggccgatgagaatactcgcaccgcattgcagaccgccattaccgaggcgaacaccgtggcaagcagctccaacccgtccgaggccgacgtgaataacaccatttccaagctgcagaaggccgaggccgacgtgaacgcttcaatgcaggccaagcaaaaggctgacgccgatgcggcagcacaagctgaggctgagaagaaggctcaggaagaggctgcggcggctaaggctcagaagaaggccgaagaagaagccgacagctcaagcgggatgaatagcgacactggtagcaactagtagttctgcgttccgcatataaagggcgggtcaaatcctacaacaggatttgacccgcccttattgctatttggtgctatccgttggcgttactgtcgcttagccatcgcgcgcaacacaatcttgcgcagctcggaagcaatcagcacaatcgcagccaggctaatgcattccacccaggccatcgggctgagcgcaacggtaccgaacgggccgttaaggaacggcacatagaccaccacaagttgcagcgccacggacaggccgatcgcgccccacagccacttgttggagaacaagcccacgaacacggactgcaggtgggagcgggaggcgagcgcgttgaacagctgggcgaacaccagaatcgtgaagcccatggtacgagcctcggtcatctgtgcctcatggccgatggcatccaccgagcggtcggtgaacaggccgccggacaagtgcatatccatgccgatcagtgtgacgatggccatgatgacaccgatgtagatgatgtcgccccacatggaggcgtcgatcacacgatcggtcatcttacgcggcttacgacccatcacatcgtcggtttgcggatccacgcccatggcgagtgcgggggccgcatcggtcagtaggttgatccacagcagctgcgtggcgaggagcggtacggcgacgcccacggattccggctgacggatgccgaggaagccagccagcaccacgccgaggaacacggtgaacacctcgcccacgttggagctcagcaggtagcgcaggaacttgcggatgttgtcgaagatcacgcggccttcgcgcacagcagccacgatggtggagaagttgtcgtccgccagaatcatcttggcgctctgcttggtcacttcggtgccggtgatgcccatggccacaccgatatccgcggacttgacggccggagcgtcgttcacaccgtcaccggtcatggccacgatgttgccctggcgctgtagggactcgacgatcttgagcttgtgctcaggagccacgcgggcatacacggacacttcagcagtggccttgtcgagcacggcttcgtcgggcagctgatcaagctggtcaccggtcagggccttgccgtccttggcgatgatgccaaggtcggaggcgatgcgggcagcagtcagcgggtggtcgccggtgatcatcacggtgcggatgccggcacggtgcgcctcggccacggaatcgcggacctcagtgcgcggcgggtcgatgatgccgaccatgccgttccagataaggtcggtttcgatggcctcggactgttcggcgatgtcggccacctggcccgcggcatttacgctgacacccggcacatcggccagcgagctggtttccagcggtcgacaggcctgaccaagcgtgcggtatgcctcggaagagaggcgttcgacggtggccagaatcgactgacgatcaccttcggtgagcttgcggacctggccgcccacgcgaatgcgcgagcagtagctcagcaacacgtccggcgcacccttggcgaacacggtcagtttgccggaatcggtgtcgtctttagcgatgatggacatgcgcttgcgttcggaggtgaacggaatctcgcccacgcgagtgtaacggctgaccttgtgatcagccttgaccttgcgagcggcaacgaccagtgagacttcagtggggtcgcccacaatctcccacttgccgttttcctgacggagttcaccgtcgttggccagtgtgccggccacgagtgtggcaataacctcatcggcgatggtcttggcttgatcggattcgggatcaacaccaccggccatgaccatgcggccttcgggcgcgtagccggtgccggtgatctgcacctcaccggatggggtgaccacacgttccacggtcatctcgttacgggtcagggtaccggtcttgtccgagcagatcacggaggcggagcccaaggtttcgacggaatgcagcttcttgacgatggcgttgtgggcggccatgcgctgcacaccaagggccagtaccacggtaaggatggcggccaggccttccggtacggcggccacagccagcgaaacggcgagaagcagagaatcaatcacgtcatggacgtcgttgaagccctcgagcacggcgagcgctaccaataccacgacggcgatgatgcacaccgcaatacccagaatcttggagacataatccatctccttctgcagcggagttttctcgtcttcggtggcggaaagcatgtcggcaatcttaccgacctgtgtgttcatgccggtgccggtcacgatggcacggcctgtgccctgcgtgacggatgtgccgttgaagatcatattggcgcggtcgccaagggccttcgcttcggtgagcgtatccggcttcttaccgaccggcacggattcgccggtcagggaggcttcggcaatgcgcaggctggccgcgttgaccagtcgtccatcggcagagaccgagtcgccttcggcaaggacgatgatgtcgccgggaaccacgtcggcggtgttgatgcgcatgaccttgccatcgcgcagcaccgaagtctgcggggccgtcatttgtgcgagcgcttcgacggccgcctcggccttggcttcttgcatgtagccgagcacagcattgacaatcaggatcaagatgatcacgatggcgtcgaacggaagcgcctcgccgccttccgcgccgggctgcgcattggctttttcgatgaaccaagcgatcaccgagataatagtggccgcgatcagcaggtagaccagcggatcttggaattgggccaggaatttcttccatttcggtacgggcggggcgctggcgagctcgttcgggccgaatttggccagtcggcgcttggcttcttcctcgctcaggccgtgggatgggtcgacgttcagggctttggccacgtcgtcgacgctggtcagacttggatcagtatcccccaatagcgcttcctgtgcgcgcacttcttccgattccacgaccccgttcgttgcggtcgcggactttgcggattgatcgttacgatcatccatggtgttctccttggtatcgccgcggagtagtcagcctcgcgccggcaccgggttgtctctcccgggcggcgcaggactgcgcggttatgggcatcgacgcaattgcagccgatgcgtacgatgccattattccataacccggcggcacactggtcaagccatgacgggcgagctgggcgcggacatcgtcgagcggtacaacgactcgcccatcgctgcggccgcgctgcccgccctgacctcggtgcgtccgccgtacgcgcgtatcgtcaccgaggtcttgcgtctcatcgaaatcgggcccgggaatcccacgcacatctcgttgccaccggaactcgtcgtgcgcgcctcgagctcgaatcggcttatctgacggcgagggtgcccacttgcgcgccgacggccaccgtaccggaaccggtaagatccaaagcggcgatggtggccgggttggtgaacaccacgatgacgtcggtggctttgcccgcggccttgaccgcatcgaaatcgaccttctcgatgggatcgccggctgagaccgtctgcccggcactcaccagcatcgtgaaaggcgcgcccttgagttgcacggtatcgacgccgatatgcaccaacacctcgacaccgcccggagtggtgatgcccacggcgtgtttggcgtcggccacggtggtcaccgttccggaaacaggggcgacgaccagcccggaggacggcaccacgccgaacccatcgcccagaatcttggcggcgaacgtgtcgtcgggcactttctcgatggactcccagacaccatcgcatggggcgagaaccgacgtcgctgcgggggcgggcgccgcctcatcgctgttgtggaacaaaccggagaacaatcccataatgactccttgaaaaccaatgatggacgataacggatgggttgcgtgacgccgatcatgtcgacgtcacgcaacccatccgtcataccaagcgacagagcgccaagcgctaggctttatgcagctcttccatggcatcggccacagcctgcacctgcgtgccgaccacaacctggacattcctgtcgtcgatgaccttcacgccgggcaccagcttgcggatggcgtccacatccaccttggcggtgtccttgacacccagacgcagacgggtcacgcagttctcgatgtcgacgatattggccttgccgccaagcagcgcgtagagcttcgcggccagcgcggcgtacttgtcgcgggagaccgcggcggccggggcggcgccggtgtcgagaatgcccgccacggcggcggcgccctcatcgtcaacgccatcgccacggcccggggtcttgaggtcgaacttcttgatcatgaacgtgaacacgaagtagtagatgaccgcaaagaccaggccctgcacgataagcatccacggcatatgcgcctgcggcacacgcagcgagaggaaccaatcgatgaagccggcggagaagttgaagccggcgatccactggaaggacgcggcgatgaacaccgacagggcggtgagcagcgcgtgcaccacgtacagcgggaaggcggcgaacatgaaggagaactccaggggctcggtcacaccggtgaggaaggcggccagaccaccggcgagcatcagggagccgacggtacgacggttctccggcttggcgcagcggtagatggcaaacgcgcccgcaggcaagccgaacatcatgatcgggaagaagccggcctggtacatgccggtgacgtactcgccccacggctggaatccaccggtggccagcacagccttggtggtgccgttgagaccgcccacaccgttccagaacttggtgatgtcatcaatgccggcaaggttgaaccagaacacgttgttgagggcgtggtgcagacccgtggggatgagcagacggttgaagaaggcgtagatgccggcgccgaccgcgcccatacccatcagggactcgccgaaggcgaccagaccgttgtagaccagcggccacacgaacagcagcaccagggaaatgaccgacatcagcgcggcggtcaggatcggcacgcagcgacggccggagaagaaggccaggaagtcgggcaacttggtcttgctgaaacggttgtacagcgcaccggacacgcagccgaccatgatgccgaagaacacgttcttgttgccgatggcgccaggagcaaaggcggccggcgggttctcggcgtcgaagcccaggaacatggaggccgagcccatgatcgtggtgatggtcatgaaaccgaccagaccggacagggccgaggcgccgtccttgtcacgggccatgccgacggccacgccaacggcgaacagcaagcccagattgtcgaggatcgccgaacccgtcttgcacagataggcggcgatgacgttgccgccaccccaaccgctcggatcgatccaatagccgatgcccaggaagagcgccgcggcgggcaggcaggcgacgggcagcatcagcgcgcggcctagtcgctgaatataggctttcatttctttctcccttcatgcgggttttccagcggtggagtacttctctgtgccctgctccgccgtcacgcgccgaccctccattggaccggccgatatccggcggggcgagtaccgctttcaacggataatagtacgccacagacgtcatgcgccgcaactcagcgcactgaaatcaaggctcggagaaccgtgcgcggatttcggaaacctaatcgaacatgcaaagcgtctgagccgcggaatgccgccattttcggtcatgttcgtttgtgcggaaacagttcggatgggtgcacggttcttactgagaatcgtcctctgcacccatcgcggcggccatggcggcgtctcgggaacccttggtgacccgcaggcccacggtgacgccgaccaacaccaccgtgcaggcgatccacagcatccgcccgccgaagccgccgatcacccagccgccgatcagcggcgccaatgcgatcgacaccgaccacaccacgttatagacgccctggtacgtgccgcgggcggtggcgggcgccatggcggcgaccgtggtggtggcgatggggaacgtgcccagctcgcccagcgtccacagcactacggcaagcgcgaacccgccccatgaatgggccacagcctgcaccgcatagccgatggcggtcaccgcaaggcccatcacgagcacacgcgaattgcccatgcgcgcgaacagtttcatggcgggaatctgcagcagacacagcatgccgccgttgatggtcaacagcaccgaatagtcgcccaaccccagaccaaggtccgtcatggcaatgggcaggccggaggtgctttggaagtacacaaggaagtagccgaacatcagcagggagaagccgaggaatggagtatcggtgagcacgcgccgccaattgcgagacatggcgccctcggggcgggccgccggcgccgaagtcgtcagatgcctcacttcgcggaagaacacgatcagcaatatcgtgacggcgatcatcaccgccgcctcgacgtagaacatcagcgaataggagatcttgatcagctgattggccacgatcgggccgatcgcatacccgaaattgatggcccatgattgcaacacataggcgcgctgttgacgcttgggaggcaccacgtcggcgatgtatgcggcgatggctggactgggcagcgaggcgaacgcgccgtatacgaacagggccgcgcccaacgccacgggatcggcgaggacggagacgaccagaagagcggcggccgcgccgatttcgccgatgatgatcatcgactggcggccgaaccggtcggacagcgcgccaccgaaaagacagccgatgatggcgccgaaaccgtacatggccacgaccgcgcccacaacgccttcgccgaggtgcagcgcggagaccaggtagatcgacaggaacgacgtcacgaagcgacccatccacagaatcagaatcgccaaccataatccccaatacagcagggacagtccgaatatcatgcgctgcttcttcactctcaataccttaccggctaccgacggcggaatagccgcgttttggcgcggggtgctgggacaatagcacctatggctatgaaaaaaggaccgaccaaagggtcgggtggcaagcaccgcaataagttgaagggctacggccctactccgaaggccgaggatcgcgtctatcacaaggcttacaaggccaagaaggcgaatgagcgtcgccagatcgccgacccgcgcttggcggcccgccgccgcgtggataagttcgcctcctccgacacctcggatctggtgtacggccgcaactccgtacttgaggcgctgcgcgtgggcgtgccgagttccacgctgtacatcatgtctcgcatcgagcatgatgaccgcacccgcgaaatcgtgaagatcgccggcatgaacggcctgcacatgctagaggccgaccgtctggaaatggatcgcatcgcacgctccggcaatcatcagggcgtaatcctgaaggtcgatccgttccagtactcctctctgagggaattggccgaccgtgccgagaagaaggcaaaggccatggaggctgcgaattcggccgccgcacgcatcgcggcccgcccgctgttcattgcgctggacggggtgaccgacccgcagaacctgggtgccgtgattcgttcggcagccgcattcggtgccaacggcgtgattctgcccgagcgtcgttccgcttcggtgaacgccgcagcatggaaggtgtccgctggcgcagcggcccacatgccggtggctcgcgtggtgaacctgaccaaggcgatcgaaggcctgaaggagcgcggctactacgtagtcggcctggacggcggtggcgacaagctcgtgggcgaaaccggttttgagaccgatccgctcgtggtggtgctgggatcggaaggcagtggcctgagccgactggtgcgcgaatcctgcgacgcgattgccggcattccgatcagttcgtccgtcgaatcgctgaacgcttcggtggccgcgggcatcagcctgtacgccgtgtcccgcgcccgtcgcgagggcgccgaatcagctcagtaagctaagcagccaaacaaagaggtccgccagcgatggcggacctcttttcgtttatgccacagagagcgtttgggtgagcgcgtgggactcgccgggttcaagccttaccgcgtgctcccggcaggcggcggcctcgcagcacacgaagcggcgccattcctcgttgacggaatcattgaccagcacgccgtacggttcggcggggttccacaccacggtttgcgcagagccggacttggcaacatgaatcgtgcggccaaaaccttcgtcatgcagttccactgcggcagtcgaggcatatacacgatccaccgggccatcgaacgccacggcctcgcccggctgctcacacggcgcaaaaccattggtcgcatcctcgtaatgtgcgtgctcaagaccggtgaggcgaatctgcgagacatcgctgacgcggaaatacgtatgcagtgcggcttcataggagaacggcgtggctccagtgttggtcgctgtaagcgtcatggtaagggtatcggcaacgtgcacctcataatcagcacggaaactgggcacggcatccccctcgaaccaaggcagcatatcggaaggcacatcagcctcggtcaggctgtaatgcgcatagctattgctgaaggactcagcatcgagatgccactgcctggtacgaacgaatccatgattcggctttttgccaagaccatggccgtcggcaaagccgggcccaaaccacgggaatatcaccggaacaccgccgcccagcggcctaccttcagcaaccaccaccgaagaaggtgcaaacactacatccgtggcctggctcagcggccgccagcgcagcagatgcgcgccgtggtcgctgatggtggcggaacctgcggaattgtcgatgttacgaaacacgaaatcagtcattacctctcctcaaatatcggaaaatagcgctgcggtttatcagcgctgggccgactactgtcgggtaagcccaagttcagcgaggaacgcgaccgtctgctccttggttttgaacacggcggtattgccgagaatacgctcgcacacgctgccaagttcttcatgaacggcttgatgaatggccgctcggtcacgattgccgttcagtgcggcggtcagctcgtcccattccagcgtgaactcactcaccgatgcgggtaacggctggccctcggccaaggcgttctcaagctgggcaagttgatcgaccaaacgtccgggcagaataaacagaccttgcgcttcgatgaggccaataggctcctgcttgatcggccagaattcgggatgcgcgtggaacactccctcggggtattcgctgctgacggcattgttgcggaaaatcaagctcatctcgtacccgcgatccgtaatgatggcacttggagatacggcggattgacgattaccatccgcgtcatgactggcgatgttcgctgcactatcgtcaaactgctgccaagcgagtcgaatcatatcgctgatttccacgatggcatcgcgattgcgagacaccacacgtacggcggtacccggccagtcgaggatctcaaccacggcatctggatagccgttcacgtggaatgtggcccaagcggccgccttgtgcatgggcagatgctcgccgccgccctgatagtgatcatgagccagcaccgatccgccgatacgcggcagagcggcgttgcagcccaggaagtatccggggaatcggtcaacgaagtccagcagatggccgaaggtatcgcggtcaacgtgcataggcgtgtgctcggtgttgacgcaaatgccatgctggtggaagtagccatatggagagaactgccagaaccacggttcgccgcccagcgtgaccggcactgtgcgcagcgtacgcttgtcacggcccgcgaaaccttcgttctcatggcatatcgtgcaggaagggtagccacccgccacgctattgccggctgcagccttcttcatgttcttgaattccggcttggcgagattgatggtcacggtgacgccatgcgaatcaaagcgcggatttttgtcgagtacggctttcttgacgtagttgttggccacgctgtagtcgtaaaaccagcgcatggcctccataccatcattggattgttcaacggccacgaaccgatcctgtacagcggacgggctggcggacagcagacccatcaccacatcggcgtatcgcggcccttcttcaggctcgaataggccagcggcaacgcatgattcgcggaagcggctcaacagttcgtccggcgcggtgtcgtctgtggtctctccggtcgggcggtacgaatccagctcaaacagttcaaaaatgcgattacgggtccaatccgcatcgcgcgggtcaaggttaagatgcttgccggcataatcgaccagtacgtcgatgctggcatacacgtcgttcaggctgctgacggtgttgtctgttgcttcgttgcgagacattggttcgtctttctgcttattgttaattaccctaacaattaataattatagacgacccacggtcaacggcacacgcaatccacacacataagaaaccgcacctccgatcatcgaatctgaattacttcagtccaacaatcggggcgcggttcacagggtcgaatatatagatccgcttaatggctccacaccgccgcgtcaggatcgtcgtcggggttgtagccgtcgtcgtccaggccgccgtaagtggtctcatcatcgatgacgccggaatcggcttcttcgttgagttcggcaagcgccttggaatcgagcttatagttcggcaagacgttttcgatatagctagtcacagcctcgcccatcggcacgtcgtggccggccttctccgccaagaaccaacgatggtcaagcacctcgtggaagaactgcgccggctcgatctgcgaacggtactcacgcggaatcatgcgaaccgttggctcgtacacttcgcgcatccaatcggtggccacgatttcgagctcctcgccgtcacgccatgtggaggcgcggtaggcatcgagatcgttgagcaggcggcgggcctggttctcctgcacgtccaaaccagtgagacgcaacagcttgcggttggcgtaaccggcatccaccacacgcgggcggaccagcacacgtttgccgtcctcggcggtcttcatctccagctcgtccacgtcgaagcccaggtcgttgagcttgttgacgcgctgctcgatcttccacatctcatccgggccgaacttgtcggtgtcggtcagcgtgctccacaacgagtggtagcggtcgaccagacggttgcccacctcgatctcgtccacgtcgctcggcagcaaacggccagaagccaaatccatcaattcaccgatgatgttggtgcgggccaggtcgatatcgtattcacgctggccatcggtaagctgcacctgcaaatcaccggtttcggcgtccaccaggaaggcggaaaacgcgtcggcatcacgcaggaacaggacgttcgacagcgacacatcgccccagtagaagccggccaagtgcaggcgaaccagcagcacggcaagggcgtcgatcaaacgctcggcagtatccggctggagattgcgggcgaacagcgcgcggtacggcagtgagaacttcagatgcttagtgaccagaatcgcttccagcggttcgccgttgcggtcatgacgaccggtgaccacggcaatcggggtgacggtcggcaactcgagcttctgcagtcggcgcaaaatctcatactcgcgctcggccacctgacgggtgatctctttcatggcgtacacctcgtcgcccacgtgcacaaaacgcaccacgtggcgggagatgcctcgcggcaggttggccagcaggtcctcgggccaggtggccaggggcttatgccagggcagcgtgaacatcttcgggttcgaactggcggcggtgatcttcaatgcttgcggctcagctgaactggcatgttcgtcttcggctttgacggacgtggccttcagcgcgcgcggatccatctggggcaaatcgttcaactccatgtgttcgattttacgtggtgcttgggaagtgcagcgagtagcggcgacttcggcgcgttattctcgcatacgaataaatcatctgtatgggatttgccggccgaattgacgtcccgtatgcggcgcctcatgcgcaatctgaacaaaatgaacgcaacaagtaacatgagccccgctgccgcggcaatgctgccaacggcggcacccgtacgactgataaggccaggattgcccggctcctcgctcgggttattttcgggcgggacaacaggagttccagtgctaaatttcggctctactgtgatgttgagatcagcggatgtgtctccactgccaggaatcgagatgaggaacggatcacagtcgtatgctttgttggctttcgccgagctcgtgcgggagaccagatataggccgagcggcagattctggaaagtgagctgaccagctacgttagtggtgccggaatgctggtacagcttgtttttcgccgcgtgcgtagcgagcttcttggcagcatcgtgatattcacttgatgtcaggcgttcccaatcggcagtgaggccggaaaaatcgccgacggttttatatgaggagacgctgccatcattgttcgttgtgacggtggcgacgcgcacgatggaataggtatcgccggcaagcaatttgggcgaagccgtgtctcggccccatacggcattgatggtgagagcgccgaaagaatcagcttgcgcatacggcaccatagagccgaaggctgcaagaacagtgagaacgatagtaacggcggcggcaatcatggcagcaatgcgcgccgcaccatattcgtttccgctatgcaggtctaacatgtctgcccggtcctttccgccgtgatgaatgtgattggttatttgtactgtctggctgaggaggcaagtaaccgtccggctcgatatccgcagagtccgaatcaccagatgcgaccttggcgctcccactctgtcggcgtcgccgctcatgacgctgccataaatgccatgcgatgaacaaggcaatcagtgcaagagacggcaacaagtactgcagcggaatgtccacgtggaacgtggatctggcgtcatcctgctgctgcggcgcgtatgggatgcgatggccacgcaccagcagccgatgcgtattgaccgcatacggcgtacaagtgatgagcgtgaccaaatccttgccgggctcaattgccagttgtttggtatcggtcggcagaacggtagtgatcttatcgacctgatacgcatacgtgtctttaagtattcaccatcagccttggacagagcaacgctcaccttcagtccgaacaggttcacgtacagcacgttgccttccgaaagcaccttgagatcgaatacctggcggattctaatggtggttgcaacgcctgtgttgttttgttggttttaggttagttggtgctgtcgagtagttcgatgtttttctcgctgggtttcatgtatccgagggttttgcggggccagttgttgagttcctcggcgaccgcgtccaggtagtcctcgtggcgcgcggccatgcggctcacgggcctgtttttgaacatgcggcagtcgcgcggcatgatgaaaccgcagtccaatgattccgacaggcccctgcaaatcggcccgacctcgaagcgccccttgtgttcgtcgacgtaggcgaccatcaggggcgtgtcgggtcgagcctggccgcgaaaaaagccgacgccgtcgtcaatatctcgttcgcccgacacaactcgacgacctcccggcgcggtttcccgagctcggccatcgcttcctgcgccgattgcctcgtctccgccgtgaccgtcgcgtccgcctggttgcaccaacggcgcagcgtctccggggccacgcccaggtctttcgtcacctgcgctcttcgccttcgtctccggcgaatacgaagagcgtgattccgtcagcagtctgacggccttcaccctgaactccggcgtgtatctcgtgccctttgtcatggttccatcatctcccatcgagttaggggaaacacggaacaaaatcagtccatatcacggcgtgtcgcattttttttcgatatgatatatgtatcacaaaaaataaacgtttaggattcaatgatgaataggaacgctgtaaccataactgacatctcgaagcgtacggggttgtctgtgtacgtcatctccagagcgctcaacgggaaaagcggagtcgcacaagaaactcgatccaggatacttaaggttgccgatgaaatggggtatgtccccaacagcaaggcgcaagatttgcgtacggggcgcaaccgttcgattacgttgctgaccgcgggtatgtcaaactcctactatctcgatctgatcagcggtatagaaagcgtcctgcaaggcagagaagaaagtctcttcatcgccgacttggctgttaatggacgctatgaggaagacaatgagacgtcgcttttgcgacgagtggccgagaaccgtcctggcggcatcatctcaacgctaggattgagtgatcgcagtagaagaatgctgagagagtggggggtaccgacgattttcgtagattcaacccctgaggttgagggggtgcttcaggaagactcaggtgatggcttctcctatgtgacgacagataacgttgatgcggcagaacaacttggtgcccatttgaacgagcatgggttccgtaaatggttgcttgcgatatatccggatatatggaatagccgttatgcacgtgaacgcagtttggtttcggccgcaacgaaatccggagctgagattcgcgtgatcgaatgcggcaacaatgagaaagatgcatgtgccaccatgcttaacttcatggacacgcagggctatgagccggatgtcgtcatcgctggcaacaatcccatattgctcggagtcatgtcggcgtttcaaacgcgaggggtaaggatcccagttgacgtgggattggtgactttcgacgattttgcctggtcagatcttctttcgccgagaataactctcgttgcggagaacagccatttaattggagtgaatgcagccaactttctgttggagcagattgaagagggaaaggaggcgagtgagggagacgggccgacgatgatgccaaagcctgttcgcagaatgattaaatcttctctgaaagtcagagaatcatgcgggtgcctaacgcgatgatgcgttgacgcatgtcttgttgaaaaggaaaaccatgaaaaaaacgtttatgatgcctgttgtttgttccttgcttgcggcttcaatgatgttgtccggctgtagcgcggtaagcaacggcgacaatgcggtcggggggacatcaaagccaacggagatcaagagcattggcctgatggtgcaggatatgtccaatccgttcttctctgccatggatagggaggcgaaagttcaggcgaagaagattggcgctacgctgaacgttcaggatgctcagcttgatctgactactcaggataaccagatctcggcgttcattgagcagggtgtggatctgatcatcgtctccgccgtcgatgagagcggtctgaagccggccatcgagcgtgctcgtgccgcgggtatcattgttgttgctgttgatacgccggcgaagggcgccgacgcaatcgtgatgacggatggtgtccaggctggcgagctttcctgcgaataccttgccaatcaattgggtggcaagggcaatatcctcatcgtcgatggcacccctatccagaccattacagatcgaattaagggatgtaagatggcgattgagaagtatcctgatatcaaggtggttgggcagcaggcttccaagaacgatcgagccacaggtctttctgtgaccacagatatgctgacggccaacaaagacgtgcagggcatctttggtatgaatgatccgtccgccttgggcgctgcgctggcggttgaacaagccggtaggagcgatcagatcatcgtgactggtgtggatggtagccccgaaggggtcgatgaacttaagcgcgctggttctccgttcgtgggaatgtccacgcagaatcctgcggagatggttcgtcaggccatcaagttcgcacagcaagtggtggatggcgagactccggaggagaccaccattcttatccctagcgagatgatcacccgcgagaatgtggatgaatacaaggggtggtgagcatgaaccaggatcgtgcacccattttgcgcctggaggacatttccaagagtttctctggtgtcactgtgctcgatggcattaacttaaacctttatggtcatgaggttttggccttgatgggagaaaacggagcggggaaatccacgcttatgaacatcctttccggcaacctcatgcgagactctgggaagatcgtggtcaatgggaatgatgttgatatctcgtctccccgccaagcctctgaacttggcatcgcaattatccatcaggaactcaacgtggttcctactatgacggtcgcgcaaaatcttgccttgggcaacgagcccaagggcaggtcagggcttgtcgacaagaaacagatgcgtgaggatgctcttcgcaagctcagcgtcatcggtacagacattaatcctgatgtccctcttggtgagctgggtactggcgaacagcaaatggtggagattgccaaggctgtagcgagtcgggcaaagatcctcatcctggatgaaccaacggcttctctgtctcgaggcgagtccgagcgcctgttcgacatcgtggagaaactgcgtggcgaaggcacaggactgatttacatctcccaccgtatggaggaggtgtggcgtctggctgaccgtgtcacagtgcttcgagatggtcataccgtggcaacgtctgacatcgccgacgttgatcagagcgagatcgtggcgaagatggtgggacgcaaggtggagaagctctacgatcacgacgagcgctccgctggagaagtcgttctcgacgtccgtgatcttcgtctgtctcaggattctccatccgtgtcgttgcaggttcgtgcgggtgaagtcgttggcgtgtctggcttggtcggtgcgggcaggacggaaatcgccaggtgtgttatcggtgcagataagcgattctctggggaagtgagtcttaaaggcagaaacgtcgcattccaatctcctaagatggcgatccaacatggtgtcgcatatttgcccgaagaccgcaaggtgcagagcatttttccggttcgaagcgtggaagacaatatttccgtttcaacgctggaacgtttcgagagtttcggcatgctgcgaaagcataagattcgcgaagcggtggggaaactgatgcagaaggtcaacattgcgtcccgactgcagcaaacgcccatcgttaacctgtccggcggaaatcagcaaaaagccatatttgctcgatggatgatgcgaaacccggatgtgctgatcctggatgagccgactcgaggagttgatgttggtgcgaaacgggagatctacgaactgatcggagaacaggcggcgcaaggtaaagccattctgatgatttcgtctgaccttcccgaagtgttgggcatcagcgatcgcgtcttggtcatccggcaaggatccgttgtggcgaatctggaaagtaaaaaaaccacagaagaggagatcatgggttacgcgactggagtgcttcagccgcaacgccttggtcctgaacatgatgaaattcacgacaatgacgaggtgactttcaatgaataagcaaaagaaaataaacctggcatccgcatgggagaaagtcggtatgccgttcgtgctcttggtgttgatcatcttcatgctaatcaatgctccgaacttcggtacggtaagcaacctgtttaacgtggcaaggtcaatttcgattagcgccatcctcgcggcgggaatgactttggtgatcattacaacgggcattgatctgtctgttggttcgaccatcgccgttagtggctgtgtggcggtgttggccgcacgggctgggcttaacccgattcttgcggttattctgggcatgttcatcggcgcggtgattggcttgatcaatggtgtgctggtcgcctactgcaagcttgcagcattcattgtgacgttgggtacgatgacgtttatgcgaggattggcctacacgataactggtggcctacctattgttgataacaatctttcgttccgggcgatcggaaacggatatatcttcaatattcctattccgttcatcatcatgataatcgtttatttggtcatctgggtggtgctcgataaaaccaagtacggatcgcatgtgtatgcggtcggcggcaacgccgaggctgcaaggctcgcgggcatcaatgtcaaagccgttttgctgtctgtgtatgtgattgctggggtctgtgccggcctggcgggatgcattttcgcagcccgagtggtgtccgcgcaacccacagccggcgatgggtatgaaatggatgccatcgcagccgcagtgcttggcggtacggcgttggctggtggtaagggcaagatttctggaacgtttatcggcgcagtgattttcggcgtgctaacaaccggccttgtcctgatgaatgttccgttcttcactcagcagctcatcaagggcgtggtgattatcgttgccgtgctgattgatggcctgaagcagaattcattctcgtttggtttcctacgtagatcgacactatccccggccttgaaaggaggtaattgatgactacgtatgagtatctcatctcaaattcttctccggtgcccgctgaaaagcctcagccggttgaattaaagcttccggccgatctaaagcaggatcttctgtggggagatacgagcctcgggcaaagttcagttcttcagcgagtcaatggtgaatcagatggcaaagaatccgtgtatgtgggaattctcgttcctcacgacggtgaagtcattacagtacgagatgttgaatcgggagacgtgatcccggaaggcattcgtatttacgatgatacgcaggagaaagatgccgtctgccgtctggatactggatatttcattatcgagatgtgccgcggaaccggaatgggcgaaggtgcgtcgaaatggggtatccggcacttcatggcaaaagccgaaaacgttgatctgctgtcaagcggtaacaatgccatcggaggtttctatggtccgttctttaccccggagaacgggttgatcaatcctccggaacatgtcattgccgatgtcgatctgatcgagaacggtcccaatatgagccgttaccgtctggccggcagaattccggatggcctgctcccggagctccagggcaaacgctttactgtcacgttcactttttaccgtgatcttgacttgttcgatcgtgtgtacgacgtggatcatttcgaaaccgaaattgacggtaggagcgtggttgatcgaatcacggtaggagatgagttcgaggggggcgagggagaactggtgttcgatcgattcgcttcctataatcccatcccatatcgtagcggcgatccgtatgccgggttcctcaaggatgaagtgcgaagcacattgtccgacgaaacagaagttacggaacgctttgccttctttaaggagctacttgatagggatttggaaaacgctcattgggacctgtactggcgtctattttctcattgggagaatgccattgagccttcagccttaaatcgcaggttggggcatgtcagatctttggcgcatcgtgcttctgatctcaatgatcgtccttgggtggtgtcgaaagatgctattgacgtgtcagctcatgaagagcagactgtttttccggcctcttcctcctgcactgccgagttcgactcgcgtacggggcgatgcatgatatggttgacaacgcagtcttcgggggcgttccaaatcgttcaaaggccacagtcgggatgggtcaactggggaaccaatggggaaaatgagtgtcccgcattgcccattggaacgaagattcgaaccatatacggacctttcggagatcgatggcgggatcgggctgacgaatcacgatttgatggtgtgagggtggctccccgtctctcttagaaggtgtgcggtgaccgacttgtcctgctaaaccgagaaatgggcattgattgaaagacgtgtaatttcgttgaaatttaatggttttgacggattgacatctttagtcaggcgcttttggtttagcaggaccggtttggcattgtatctagttcgagcggatagttgacgcatgttctgggcatggctgacaggtgttctggggcatggttgacaacgatggggttggtagctgttgtggtgtcatggatacacggcagcattccggcacggcaggcgacaatcagaccacgtcctcggcgcaacgcagcgagtacctgcgcaacaaggctctcgccgccgcgatcaacgacggcgagagcgtggccggcgcggcccggcgctacggcgtgagccgccggtgggcgtacgagatcaaacgacgatgggaggccgacggcggttccgggctcctgccccgttcccgcgccgcgcgcacgatagccaacaggaccgacgccgtcctggcctcacggatcgtcgagctgcgcaaacaactggaaaaggacggcctggacgccggagccgaatccatcgccgccgggccggagcgcgagggcgtcgggccgccggcgaactccgcgatccaccgcatcctcgtgagcgccggcctggtgcgccccgaacccgggaaacgccccaaggcatcgtacacgaggttcgaggcgtccccgcccgacgaactatggcagtcggacttcacccactggccgatcgccacggttccgggagccgtggtcgtctcctggctcgacgaccactcccgcaacctgctgcacgcgcgtgcgttcgccacggtcacgatggacgacgtgcaggccgcgttccttcaggcgtgcgccgaacacggcatccccgccaggacgctcaccgacaacggcaccgtgtacaccaccagaccgatcagcgccaccccggggcgtttcgaacgcacgctcgcgctgatgggcgtgcgccagagcaacggacggccctgccacccccagacgcagggcaagatcgaacgctaccaccgcaccctgaagcaatggctctccgcccgtcccccggcgtcctcgatcgacgagctcaacgaacagctcgccgaattccggcacgtctacaacgaggagcggccgcaccgcgcgctcggccggcgaacccccccgtagaagcgtaccgcgccaagggcaaggccctgcccgaccccgaactcgcagcccgcacgcaggtcaaactcgacgaggaacaagcagccgaaccgcagccagccaccccatccggatccatgcgcgggaaacccgttcccaaggacgagcggaccgaaccggcgcgagcggacgtcaccatagggcccagaatccgcaggatcgacaggcgcggctgcgtcacgcaggacaacatcgtcggcatgcgccgtgtcttcaacgtcggcaggcgcaacgccggccgcatggccgaactgctcgtcgaccacgggcaagccgtcatcaccgacctggagaccggcgagatcctcgccgaccagacgctcgacgccacccgcgaataccaataccgcaagccggcgaacgatgtcaacgatgccccacgacagatgtaaagcatgccccaagagatgcgtcaactatgccccaagacatcacagtcttgccgttgatctccttggtgacctgaccctcaaagtcacggccgccaagcgccgtcgcggcaacctgcacattggccttcgccggcgattgatccgtcgcatttgaggaatcgttcttggcgtcttgagaagaagcatcgtttggagcctgcgtttgggctccatcattagcggaattgccagcggtagcttctgctgagtcgtccgccttattgtctgtcgcaccatttgaggattcggaagaatcaccagtagtagaagatgaaggagatgaatcctgctgtgcgtcttgattcgtttcggaaggtgttggcgcaccgtttgatgtattggcctcttctgacgtcttatcgtcaacgttgacattgcgagcagaaggagcagctacgacagtattaccccccccccagaaattacggcgttaggagagctactcacatcgtctatattctgagcatatgctgcaggcaccatgcacacgatggacaaggaaacagcaataaccgaagcaaggcaacgcttcaaggcatggctctgccgtccagattcctgttctgttcctccgttaaacccgcaacggacgaacttcaatttcgagctcactgtttcccctcatagattggcaatcccctttccgggaggttactgcatacaaccatacaagaagttgacaaaagaacaaaaaacgttcatttgcgggggccggttagcgtatgtctttctgggcaaaaagaaaagccccgcagctatgcagggcttttccaacgaggtcataagagaggaagagaacgaccccgtttaatggttgacgaagctttaggacctcgccaagtatctactagttcagacgcagctcggtggacggtgcgaacaggtgcatcttggccggatcaatcttgatcttgaccgtggcaccaacctgcggcagagcgcgcgggttcacacgaatcgtggtgagcttgttctgatcggacatgacctgagaagcctcagctgcggagccatcggtgatgatgttgccgtagatgtagccatcggagcccagatcctcgacgttcacaaccttcagggagaaggcgttcgggtcgtcagccggggccagaccagcgtcctcaggacggaagccgaccacgatctggccgttgtcttcggcggtgagcttggcgacggcctcagccggcaggtccacggtgtcctcaccgatcttcgccttgccgttgaccaccgggtgggtgttcaggttcatcgacggggagccgatgaagccggcgacgaagacgttggccggacgatcatacagctcggtcggagcaccgacctgctgcaggataccgagcttgatgacggcgatgcgatcgcccatcgtcagagcctcggtctgatcgtgggtcacgtacagggtggtgacacccagctggcgctgcagggcagcaatctgggtacgggtctggacacggagcttggcgtccaagttggacagcggctcatccatgaggaagaccttcggctcacgaacgattgcacggcccatggccacgcgctgacgctgaccaccggacagagccttcggcttacgatcgaggtactcggtcaggtcgaggatctcagcggccttctcgacgcgcttgcgaatctcttccttcggagtgccggcgatcttcagagcgaagcccatgttgtcggccacggtcatgtgcgggtacagggcgtagttctggaacaccattgcgatgtcgcggtccttcggctgcatcgtggtgacatccttgccaccgatgaggatgcggcccttgttgacctcttccaggccggcgagcatacgaagggtcgtagacttaccgcagccagaggggccgacgaggacgaggaactcgccatccttgatatcaagattcagatcatccacggagggcttgtcgttgcccgggtagatacgagtgacgtggtcgaagacgacttctgccataattaccaatcctttcagaggcaggtacgtgcctcacgatccgttgtaaagggatttgttctttactgtgcttccgccctcgctaccgacatacaactttgctctcggaaactgcaagcttcagcgtttacttttttccggttcagtgaaggttctcttcgttgagccaagattcactatacacggccttgcgaccaaggcaagtggcgtgtctgaaatgtaggtaacatttgagcactacgccatattgtgttgagtgtttctcccgtatggaacgaaaataagagcaaccagggtgcctcgggcaagacgatgctcctctatgcaacgctatgcaacggaggaatctttctgggctcgtacgatgaacgtgatctcgccactacccggcgcatgcaacgtggtaccgaacgcaatcgtggagccgaatgcatcgattacggtggagtccatctccaaaacctgggtaccatcgggcactccgaaataccatgccatccgcgtatctaacgcatgcacgcgcacggcggcatcgttctctaccaaacgcaccgcgtaattatgttccagaaagtcatatagcgactgatggctgaaatcctgatcgaccaccttcgggaaccgcgccgccgacaagaacgtgatcacatgctgcttgagcttatcatccacgtatcgcagcctctccagtcggaccaagtcggcatcatccggcaatcccagacgttgcgcggcctttgcgttacgcactacggcattgtcaagcaccttggtgtccaccgtattgccaagatcggcctgttgacgaaaaaaacctcgaatatggtcgctaatcacctcatgctgggactcaccttgcttggcagtgcgaaaggtacctctaccctgctctcgaaccaacaggccatcttgaatcaaatcatccactgcatgacgcagcgtgatacgacttaccccatactggtcacagagctccggctcgggcggcaattgttcgcctgaatacatcgcctgcgcacgctggcgaagattgtccctaaccgcaatatacttcggtacaccttccgccatggttgtcctccttgccttcctttacgactgtactgtgccacggatacacgaaccgccgggattggcaacccattcccggcggttcgcaggccgccctccatatatctgcagagcggccatgcaccgattatttcgcttctacggcagccttcttcttctcacgcgcactcatcgcaaacgatgcggcatagaacaccacgaccgaagcgataataccaatgatgagaccaatctgaccacccttgccgaactggccaagcaaaataccagcaacaccataatccgcatcagaatatgtggcattcgccatgccggtgtcgccaagcacaggcagcaggaaaagcggcaggaatgtaatcgccaaaccattgacgaaggagccaatcaccgcaccacgtacgccgccctgtccgttaccgattacaccggtggcgccgccggtcatgaagtgagccacaatacccggaataatgatggtggaaccggccagagccatgattcccataccgaccacaccaccaacgaagctggagatgaagccgataagcacagcattgggggcgaaggtgaagatcatcggcacgtcaagggccggcttcgagttcttcacgagcttctcggaaatacccttgaacgcaggtacgatctcaccgagtaccacgcgcacaccagcgagaatgacaaacacgccagcagagaatgtggcagcctgcaggatggcgaacacgatgaagttctgcccatcgctcagctcagattcaatgtaggagctacccgcgaacagcgcgacgacaacataaataacggccatcgacagggcgatgatgacggtggtgtcgcgaaggaaaccaaggcctgcagggaacttgatgtcctcagtggacttggacgggtgcttcttagaacgggtcagacgagccacaagaccgccgagcgcaatgcccgcaccaccggtgtgaccaagggcgacatcattggtaccagcggcatccttcatgaacggctgtacaagcgcgggagagatggtgacaatcaaaccttgtgcgatggagccccacagaatcacaccccaagtcgacataccggcaacctcgagaatcacggcgaccatcgtagccatgtagaacgccacatgaccggacaggtagatgtacttgaaacgcgaggtcatagacagcaggatgttgacaatcatgccgaagaagaagataagggcggcttcagaaccatacttcaccaagaccgtgccgacaatggcttcgttgttcggcaccacaccctgcacattgaatgcatgctggaacatgctgccaaagggatcaagtgcgccggaaacgacggaagcgcctgctgccaacaccaggaatcccaccatggttcggatggtgcccttcataatgtcggtagccttcttgcgctgcacggcaagacccaccaacgaaatcaaagccacaataatggatggctgccggaaaatatcaagtagcaccgataacacgccgttcatgctctctcctttaatctttatgtttgtttgtattgttgttttccggatttggcgccgggtcggggcaacaatgtctcttcccaccaccgaaaagggttatttattgggaacctcgacaccgtgtcgcttcagcgcagcagctacctgtgcggtgatgttgtccatgtcaataaggctgtccagaacgaccacgtcatccatcagaccttctgcagcttcagcgatgtcgcgcccgacgaacaacacatcagcagaggtaggagtaacggaggcgatatccatatgatcggtttccacaccggtcacaccaagattgctcagcgctttctcgatgttgagttgggtcataaagctagatccaaggccagtgctgcatgcggtgatgattttcattgaagtacctttcgtatgagttgtttgatgagatggaagtgcagtctgtcaggccagcgcagcggccaattcatcgacgttggaggacgcgttcaaagcagctagtttgcctgaatcggtcaacaaaagagccagcgattgcataagatcgatatgcgcgtttgagtctttcgcggccaagcaaaacatggtgttgatgggatggtcctcatcatcggccagcaggaacggcttacccactcgcagcacagagagcgatgtggagaccactccactttcaggcctcgcatgcgcaagggcaacacctcccccgagatctatatatgttcctcctggactggcaatcgatgtcttaatggcatcgacatagccccgctcgatggtgccggcgtcgagcaagggacgcgtcaccaagtcgactgcttcgcgccaatccgatacctgatcgacatacagcatgccgttcggttgaaaatacgacataagcacgatgcctccttgcaatgcatcaaaccactgcggccagctgcggccatcagacgaatttaatgttgaggttcattccgcttcaccaaattcgtattatcatcatatcgtcataacgtattatcgtcatatcggcgtgtcgctatgacgaaccgcaatccgtatgctccttttatcagccagaatcagattcgaattcagtctcaacaagactgttaaccaccgaccaatgaagcatcgaggccggctcaatcggcaaatgcaacagtaaaaacctagattgccccgaaagtcacgccgttgcgggcggccttgcgttcggctttgcgctcctcggcattttcgatgcgttggatgcgcagctggcgccaatcctcgcgcatatcgcggaagcgttcggccagtgtcacgtcgtcgttatcagcggcggcatcagccgattccgcatcggcctcgatacctgcgaacttggtgactcccagtttcaatagacccagtaattcgctcagggcttccggcatgggctcttcgccctcatcggcagacttggtcagcccttcgatacgccggcgaagcgcatccgcatcttcaggatcaatcttgagaccggcgatcaacgactgacgcatggtctcgtaatcgaggttggcaaagaagttcagctgctgcagagtcatgaatcccttgagttcagggaatcgatgaacaacatattcttcgcggtcatcggcggcgcgcgtccaatcgcgggtgagctgtggatccaaggtggcggtaatcgacccttcgcgcagacgatagtgatatagcaccttaggaatgcgcaccacgcgcgtggcctcgccgatcacattgcagatgcgggagagatcctcgattttgcggcccacggggaaggagaagccgtgttcctgataggtggacgcgggtgccagaaaggcccagaaatagccatcaatctcggctttgacctgcttcttgatggcttcgaccggagtcagcacctgcacttcatcgaaatcattgtgacgatagctggagagcagtggcttgtcgttctcggagatggtgtcgaactggaacatcaccagatcggcatcgtattcacgcatggcattcaggcagtcttccaccagcgtgggcgccacggtgtcatccgaatccgcaaagtagatgtatgagccggtcgcctgggcgatgccggcattgcgtgcgtcggacagtccgccgttggtcttgtggatcacccgcacgcgcgggtcgcgggtggcccaagcgtcgcacatggccgggcagtcgtcaggcgagccatcatccaccagcagaatctcgaggttgcgataggtctgagcaaccacagacttcacgcattcatcaaggaatttctcgaccttatataccgggatgatgatgctgaccaacggctcctgttccatgcctccagcgtagcgccgtcgtgcgaacgcggcggcgctgcgggttcgcggaccgcgaaacccttagaaatcccagtcgtcgtcatcggtttcttcagccttgcccatcacgtaggaggagccggagccggagaagaagtcgtggttttcgtcggcgttggggctcagcgcggccagaatcgcagggttcacgtcgcagatctcagctgggaacagcgccgggtagccaaggttcatcagagccttattgccgttgtaacgcaggaacttctcgacatcctcggtcaagcccacacgatcgtagagggactgggtatactccacttcgttgtcgtacagctcgttgagcaggtcgtaggtgtagtcctgcatatccatgcgctcggcgtcggtgagctgggcgatgcccttctggtacttgtagccaatgtagtagccatgcacggcctcgtcacggatgataaggcgaatcacgtcggcggtgttggtcagcttggcgtgcgcggagaagtacatcggcaggtaaaagccggagtagaagaggaacgattcgagcagggtggaggccaccttgcgcttgtacgggttgtcgccctcgtagtagtcgagcacaatctccgccttcttctgcaggaactcgttgttctcgctccagtcgaaggccgcgtcgatctgctcggtggagcacagggtggaaaagatggacgagtagctcttggcatgcacggattccatgaaggcgatgttggtgtacacggcttcctcgtgcggggtgagcgcgtccggaatcagggagacggcgccgaccgtaccctggatggtgtccagcagggtcaggccggtgaacacgtgcatggtgagcgtgtgttcgtcttcggtcatcttctgccagctggggatgtcgttggagacggggaccttttcgggcagccagaaattgccggtcaggcgatcccagacctcgaggtccttctcgtcttcaaggcggttccagttgattgcggagacgcggtcgatgagtttcagcggtttgcgcggaatagagataggtgccatgagtagtgttccttttactcgttgtcgttatcgttatcgtcgttggacttgttttcgaactcctccggcgcggtcagccggagcagtgccttataaatcattggtgacattgtggttccttagagtggttgggctcccctcagtccgcttcgcggccagctcccctcagggaggggagccaagaaagggagcccgatatatgaatggacatctgtggttgttcgatgcgtgcggcctctaggcgcaccgagggaaggcgtacgaaggtacgtcgaccgaggagcaacgacgaggatgctccatcgaacaatcagagcatgcaggagacgcagccttggacttcggttccttccagggcttgctgacggatacggatgtagtagagggttttgatgcccttgcgccaggcgtagatctgcgccttgttgaggtcgcgggtggtggcggtgtccgggaagaacaaggtcagcgacagtccctgatccacgtgctgagtggcctcagcgtacgtgtcgacgatggccttccagccgatttcgtaggcgtccttgtagtactcaaggttgtcgttggtcatgtaggccgccgggtaatagacgcgcccgatcttgccttccttgcgaatctcgatcttcgaggcaattgggtgaatcgagctcgtggagtggttgatgtaggagatcgaaccggtgggcggcacggcctgcaggttctggttgtagatgccgtccttcaaaatcgcgtcgcgcaacgtctcccaatcggacacggtcggaatctcgatgccgtacttggcgaacagctcacgaaccttggcggtacgcggttcaagcgagcggcgaccatcggtgtacttgtcaaagtaattgccttggccggccggcttggcgtagtcggacgtagcgaagctcttgaacggatggccgtgttccacggcgagcgcgtgcgaggcgcggtaggcatggtaggccacggtcatgaagtacatgtcggtgaagtcgaggccttcttcggagccgtagtgaatgccttcgcgggccaggaagccgtgcaggttcatctggccgaggccgatggcgtggccttcctcattagcgcggcgaatcgagggcaccgcgtcgatactcgtgtgctcggccaccgaggtgagcgcacggatcgcggtttccacggtgtacgccagtccgccatcaattgccttggcaatgttcagcgaacccaagttgcaggagatatcgcggcccacgtgcgcataggtgaggtcttcgttgtatgcgctcggctcctgcacctgcaggatttcggagcacaggttagacatggtcacgcggccttcgatcgggttggcgcggttgaccgtgtcctcaaacacgatgtatgggtagccggactcgaactgcagctcggcgatggtggtgaagaacttgcgggcgtcgatgtaggtcttcttgatgcgatcgtcggccaccatctcgtcgtagtgctcgctgacggagatgtcggcgaacggcttgccatatacgcgctccacatcgtaggggctgaacagggccatctgggccttctgcttagccagttcgaaggtgatgtccggaatcaccacgccaagcgccagtgacttgatgcggatcttctcatccgcgttctctcgcttggtgtccaggaatcgcaggatatccgggtggtgggcgttgaggtacaccgcgcctgcgccctgacgtgcgccgagctggttggcataggagaaggaatcctccagcagcttcatcaccggaatcacgccgctggactggttttcgatgtgtttgatcggggcgccgagctcacgcaggttgctcagcagcagggcgacgccgccgccacgcttggaaagctggagggccgcgttgatgccgcgcgaaatcgactccatgttgtcttcgatgcgcaccagaaagcagctgaccggctcgccgcgctgggccttgccgaggttcaggaaggtcggggtggcaggctggaaacggccggcaagcatttcgtcggcgtattcgatggcctgctgctcgttgccggcggcgagctccaatgccacggcggtgcaacgctgcgggaagtcctcaagatagaggcgaccatcgaacgtcttgagcgcgtaggacgtgtagaacttgaacgcaccaaggaaagtgccgaactcaaagccggcggattccacgtgctcgtagatgcggtcgaggaattcagcggagtactggttgaagaccgcagggttgtagtactggttgctgatcaggtagtcgagacgctcggcggtggagtcgaaccgcttgctgttggcggtcacatggccggtcacgtattcacgctcggctgctttgtccttatcgaactggatcttgccgtcggcatcatagagattgagcatcgcgttgagcgcgtggtagtcgtgtgccggatcgtactgttctgccgaggcgtcggtggtgttgtcgagcgacagttcggtgttggtgaggtcggtcattggagtccttattgctgttgagcgaagaagcggacgaggccgttgcggacggcagcggtgtcttctggcgtgcccatgagttcgtagcggtataggtaggggacgtggcatttggcggcgatgatgtcgccggcggcacagtaggcctcgccgaagttggtgttgcctgaggcgatgacgccgcgaatccatgcgcggttgtcggggtcattcaggaaacgcttgacctgaatcggcactgctttcttgaccacgccaccgccgtatgtgggcaccatgatgacgtatggctcgcggatgttgagagccgaatcagctgctcgcagtggaatgcggtagacgttgatgccctcgtcctgtaatcggcagctggctacaaatcgcgcggtgttctcggaggccgacgaaaagtagaccagtgctccgatcacattgctggtggcggcgaattcaggctggctggcaccgggaacactttccgcggtgatgccggattcggtctggctcacgcggaaaccatggccgaagcattggcctcagcgcttacctgctgggcaacctcacgaatcaaatcggggcggtagccggtccatgagttgttcggcgtgatcaccactggagcctgctggaagcctgcggcctgcagctgctcgaaagtgcccgggttctccgtcaggtccacggtctcgaacggcacaccaagcttggtgagctggcgcttggtggcgttgcattgcgggcaatgcggcttggtgaacacggtgacagtcatggcgactcccctccatctatctctgttgaacagtgaaacgatggccatattacatctgtgtagcttgaaatcaatacactatatgtagtggcgtgtatcacacaacaaacctagatatagtggtttctgttgatattccgccattcttgagaagccctgaaaatcagcgtgcagcgactcaccaagttatatgtggcattgttcacatttgcgctttgatcgtcatatttaagtttcgaggggctgatttgaacctttccggaggtctatctccgtttcaaggggccggtcatccgccgaaacacaagtacaaacgccttcttgccaccgtcatttcgccattcttggaccgcttctacttgggcaccagcccctcgaaacggagaatgaacgctaacgcccccatatgacggcaaaaggcctgacctgtatacgttcgtacacaatgtgaaatgtatacgaacgtataacactgatgtctgaagtcatactccgcagtggcgccgcaggtgcgccactacaatcggaatatgggactgaagacttggaagaagtggacggactggccgctgatggtgttgtccgtggtgtttctggtggtgtattcgtgggagattctctcccgtacgtacatcgcgatgcgccagaccagggcatcaacctcaggctcaccgttctcatactgccaaccgttagcggtggtgtacaagatgttgtgggcggcggtgcgcattgccttgacggaggtggcggacttgtcggtgatgtggttggtgatcttggtggtggccagcatggaatcgttgccgttacggatctcctgatcaccattctggtagccgtagccgccgaagtaatcggtcagaacgaagcccttgaagccccactcgtcacggagcacggtgttcagcaggttgttggaggcaccggcataggtgtaaccgatgtagttgaaggagctcatcacagcctgtgcgccgccttccttcacgctcatctcgaacggcttgaggtagatctcgcggatggcctgctcgtccgcccaggtgcacaccatgttggtacggttggtttcctgatcgttcagagcgaagtgcttcatgaaggagtacacgcccttctccttggcaccggcgatctcgttggaagccataacaccggagagcagggagtcctcagagaagtattcgaaggtacgaccggagaatgcgccacggtggatgttcatagccggagcgtaccaaccagcaacatgcatgtcgtgagccatatcgccgatcatctcgccgaactgcttggccacattcgcgcccacgactcatccaatatgacgtaaatggcacttcttgatacgtaaacggcattttttctcaaatttctgtcgctaccggtcgctcagcgacagaaatctaggaaatgaggccacacctcctgaatttctgtcgctcagatgccgtcagcgtcagaaattcaggagactgcgccttatttcctgaatttgtgacgctgaacgcccaagcaccactccaaagacgccaccaagctaggatagagggcatgagcgatttgaacgcgttgaatcttgaaccgggcgaagtggttggcgggtatacgctggtctcccgactcggcgcgggtgccatggggtcggtatggcgtgtgcgcgacgatggcggcactacctatgccatgaagattctgcgcgattcgttggccgacgaatcgggaacctcgaactccgccaacacagcagcgcacgacccggacctcaaacccaacatcacgccgcgcgagcgcctacgtcgtgaggccatggcgctgaagaaggtcaatcatccgggcgtatgcggcatcgttgacatggaactcgatgattcgctggcgttcattgtcaccgagctcatcgagggccgcaatctcaaggaagacgtggaggtcaacggccgttacatcggcgacgatctggaacgtctggcccgtaaactcatcgacgccaccaaagccgtgcatgcggccggcatcgtccaccgcgacatcaaacccaccaatgtgatggtctccgccgccggcccggtgctggttgacttcggcatcgccatgggcgagggggaaagccacgtgacccgcactggactggtgatgggcacaccggggttcatagcccccgaaatcattgacggcgctgaatccgatgagatgaccgactggtggtcggtggcctccgtacttgcttttgctgcgatcggtgcaccggtattcggcaccaagccgatgatggcagtgctggagcgcgaagcatcgggcaatgcgaaccttaccggactgccggctggcacgatggccgcgttccgatccgccctgaaccccgaccggtcaaagcgttgcacgccggaccaattgctgaacgccatcgctgtggacgcactggatccgagcgtgtggcaaggcactcaggccggaccgttcgccgccggcgccattgccggaacggctgccacaattgccgccgatgcagttggaaccgaggcgatgcccccttttggtgcaaccgccgacgcggatagcgataatccgcgggccatctggcgtcaggacgactacgccacggcggcaatcgactcatcgtcttcgccgacgctcagcgacggcacggcaaccgaagcattcccggcaactaccaacgctgggagcaatctctcgtcggatgatgaagcaacacaactcgtaggcaatgccaccgaaaacgccaccgaggcgatacgcccagccgcacagcgtacggtgcccatcagcgatgaaccaccggttgctcctaccacgccactatccgaacgtaccgccgtactgcctgcaccacagccagtgccacaacccctgcaacccacaccgcaaccagtgccactaggccagaacggatggaacccggccgacgggcaaagcacggctgtggatccggcgattcgccccgcattgcagcatgtcatcaaccagaccgcgcaatgcgttcccactgaggcgcttatccaaggcccgcctgcacccaatcccgcggatgtgcgtcgtggaatgtatctgcaacgcggggtattgccgctgttcctgttcgctgtgcctttggccgtgctggctgcgagtttcccgctgatcgccttgattgcagccgaaatactgctctggctgttgttgacgttggcatataacactgagtctcagttggagcgcgaaggtcgacgcggcggcgagcgcaaaagctccgattcgctgattcgcgtggcaacgctgccgtggcacatcgtcaaggcgctgctgctgtcgataccgaaactactgctgctcaccatcgtctatctggccggtatcgccgtggccgtggccgcgttgggactgccggtgcgcaccatctcgtggtatttcactgcgagccggggcgttccggttccgctgctggatgatatgccgttctccgtctccggtctggcacttggtgggttcatggccatcggttggctgatcaccgtattcgggccacagtcggccatgccccggttgggtgccggcgtgctgcgcggcatcaggcacaacgacctcgagccgatggcgcaaccaggggcagacggtctgccggccgcatcaatccctcggcaaggcagccgcggcacggtgctgctcaccctatggatcatcatcacgctggtattgtgcgcgctgcctctgctgggcatgccaatcagttgggtcccgctggcgtaatctgcattacttttacagggaattcacctcccagctaatctgtacgcggtcttcctcagggccggtcattatgatgggccccaaacatcgaagcgatttcaaggggagatccatgtcagatccgaagcgtcaggctaagcgcgccacccgcgccgagcgacgtgcggccgaggcggcggcccagcaggcgcaggccgaacaggcagccaaggagcgtaagcagcagaccatcatcggctgcattgtggtggccattatcgtggtgctggtggccatcgctggattcgccgtatacaaggccatgcagccgtccaacaccagcagcagtagccaacaaagcaacatgaccgtggacgaggcctacagcaagctcaagaaagtcagcacccagccggctaacgccgacgacaaggccggcttcgtaatctccaacaaagggtatggccagaaggccgagggggctcccaccatatccatctatatggaaccgctgtgccccggctgcgcctcggtgaaccgccagctcgatcaaacgctcgtcaagctgatgaactccggccagctcaacatcgatttgcacttcctcaatttccaggacaacaagagctccgacaactactccaaccgcgcgttcaacggtgccatctacattgccgagcatgatgacgatcccgaccacctcatgagctacctctccaacatctacgctgaggatttccagccgggcgaattgtccaattacgagccggtaagcaacgccaagctggagaagcaggccgtcaaggccggcgtgagcgaggatgtggccgccgcggcgttcagcggcaagaacgaatacctcgactggctcaccgcctccaacaactacacgatcctgcgccccgaactgttcaacagctccggcgccttctcctcccccaccctgaccatcaacggtgaatactgggatctgaagcagctcacgttggcggataccagcatggtggacggattcctcaagtccatcggattggacgccgaccaggtgggcgtggaaggcaagatgccttcaatcggcgcggacggcaagccgatttcagtggcctcctagggcaccggcccggtcgatgccctaggaccggcgtcgaccgggccgctcacggctccgcccgaattgaccactcgggaactaccggtatactagtcatttgttcgcaacactgcttatgcacgttgggattatgcctctttagctcagatggccagagcggccgccttgtaagcggcaggtcgtcggttcgatcccgacaagaggctcgtcgcgcaggaaaaagcgtattatgggtatacgtagttttttctacgcacatcattcttaccttgggtaagtgctccaggagccttccccccaactatgggcttcctggaatgagggcggagcgtcccccaactagctccgcgccttaaagggggcgggaacatccccttctctcccgcccccttcttcttttctctgccgtcctgcaaccgagcaggaatggtgatagtgccgaacgaataagccatgcaaaccagaccagccgttacgatgggtggcgtagttgtcagcagtaaggaagaggaacatctatggcacggcgttggaccccgcagcggtttgttacactgcgtcgcatccgcgtaattgcctgtgctacggcactcaccgtggcgatggtcagctcgtttgcattcaccgcaagaaaatccgtggccctaaacatcaatggccagaccacccaggtcaccacctacgctatgaccgcatcccgcctgctcgaggagcagggcatcgacgtgaaaacccatgacatcgtcgagacctcgtccggcaatcagcttgccgatcatgccgtggtcaccgtgcgttccgcataccaaaccaccatcaccattgacggcacttccgtaccattctggaccgtggccaccagcgcagaccagttgctcggcttctttgaggagaacaacgccaacgccgccaaaatcacggtcaatatcaataacgtatacaaccagctcaccggcggtctggtcatcaaccaatccggcccagtcaccgtcatcgcggacggtaagacttccaaagcccccaatggcaaactgccggctgcatccattcttgattccaaaggcatcacgctgggcaaagaggatcgcatcagcgtggaaaagaacggcgatgagaccattctgcgcgtgcagcgcgtgacgcatggcgtggaaaaccgcaccgtggtcgtgccgttctccacacagaccgtcatcgaccctaatctggcgccggggcagtccgagatccgccagcaagggcaaaacggcgagaagacgcagatctataacgtcacctatgtagatggcgttgccgaatcggaaacactgcaatccgagaacgtcaccacgatggccgttgaccagatcatcgccatcggtccagcgaaggctgaatcatccaccaccgattccggcagcactgacaacaatcagggtaattccggatccaataagccaaatgattccgcagataattcgtccaacgaatccagcaaacccaccggtaccaacaagcccgacaacactgacaacaaaaccgacagcaatccgggcaataccgacaacagcaacacgggcaataccagcggcaacaccggtaataccggcggcaacacaggcagcaccgataactcccaaaacgggaacaccggaagctccgatagttcgccatctacccccgcgccggatccggctccatcgggccgtctttggcatccgaccgtggctcaggcgcaatcctatgcggccggcgccgcagcccagcgcggctggaccggcaatgactggacttgcctggtcaaactgtggaaccgtgaatccagctggctctggtacaaggaaaacaagtcatccggcgcctacggcataccgcagtcgctgccggccagcaaaatggccgcattcggcgccaactatcgcgatgatgccgccgtgcaaatcgattggggcttgtggtacatcgcccaacgctacggcagcccgtccgtagcctggcagcattcggaacaaaccggctggtattaatcggacacaaggaagcactgatgagcaacaacacctccaccactggccatctactgggtgcggccgatattcgccgcatcgcagccgaggccggcatcagtccgaccaagaaattcggccagaattttgttattgaccccggcactgtgcgtcgtatcgtgcgcgaagcggatgtcacgaccaatgatcatgtcatggaggtgggtccgggcctcggttcattgacgttggcgattctggaaaccggtgccacgatgaccgccgtggaaatcgacccgccactggccgaacgcctgcccggcaccgtatccgagttcatgcccgaagccgccgatcgcctgaccatcgtcaatcgggatgcgctgacggtcaccccggataatgtgcctgatttcaacggcgataccagcttcaccttggtggccaacctgccgtacaacgtggccacgccgattctgctcaccttgcttgaacgcttcgataacctcggatctttcctggtgatggtgcagaaagaggtggccgaccggctggccgcccagcccggctcgaagatctatggcaccccaagcgtgaaacttgcatggtacggcactgccgaacgagtgggcactattgggcgcaatgtgttctggccggcaccgaacgtggattccgcactggtgaagttcaccagatacgccgcagacgatacgcaggcaccttcccacggcaagtcctccgcggatcgtgaactggtattccgcctcatcgatgccgctttcgggcagcgccgcaagaccttgcatgccgcgctgaaaaccattgttcccgccgaagcgttcgcagcggcgggcattgacccgacccgacgcggtgaaacgctgacggtcaccgaatttgcggcattggcggcagcggttcaatccacatcacatgccacgcctaccactgacgaggtggagcaatgattccggtagccgtccgtcaacgccccgcttatgacgatcaattggatgagccggcagcactgaccgtgcgcgtggattgcccggccaagaccaacctcaccctggaggttggcccgacgcacgatgaatggggcggtcgtcacgaactggacaccatctactgtgccatcggggtatatgacaccattaccgccaccgccaaacatccgggagccggcttctcgctggaactcgaaggcgcgcatctgggcgatttggcctcatccagcagcgacatgcgccgcaaccacgcggtcctggcattattcgccatggcccaggcggccggccgcgatcccgatgtggcattgaccatcaccaaacgcatccccgtaggcgccggtctcggcggcggctcggcagacgcggccgcaaccatactggccgtcaatcagctatgggaattgcactggccaatggaacgtctgcgtaccattgccgccacgctgggcgctgatatgccattctgcctgtccggcgggttcgcgcacggcaccggattcggcgaacgcattgaggtcattgatgcgggcagtgccgcagaacgcgatctcatcggccaaggatatgccggagaggtactggtcggcgcgtatcagtcgcagctcagcactcccgaggtgtatcacacgtttgatgcggtcggtcccggcaatggcaatcgcaatcatctgcaggcggcggccatcagtctgcatccgcgcagtggtcaggccattgacgccgctgtgaacgccggtgcccgtcatgcattcgtttccggttccgggccgtcggtggtggctttcgtgccagacaacaccacagcgcagcgcattatcgatgcctggcgcaacggcggcatggtcgaccgcattatcaaggccagtgcaccagcgcaccccattatcagagtcagccagtgacgctaatgtagcaacaagccacatgatcatgaaggaagtctaacgatgacgcagcaaattgatgaacggcaggcacgcaagacatatgtacgccaccgccagaccatcgtgttctccatcagtggcgtagtgcttgcagccattctggtggttgccattctctttaatttccatgtgttcggcctggggcggattaacacaccggccaccgcgccaaactacggcaatgccgctccctgcgccgtcaagggcgatgatggcaaggcaacgtacgtggccaatggaactgtcggcgtgcgtgtgatgaacggcaccgagcatagccaatttgccgcagcggtcagcaaggcactggaagcccgcggtttcgtgatgcaggaggcaaccaactactccagcaccaacgtcgaacgcaccactatctactttggcaagaacgccattaatcaggcctacactttggccggcaacttcaccgatgccgccatggtgatgaacgcccgtgaggaccagcttatcgacgtggtgctcggcgctaccttcaacgatctgaaagatgagaagtcatccccgcaggaaggcaagaaaatcactgatttcacggggtgcgtggccgccgataagatgacgaatcttcccgccgatacgcagcacaccgcttacccggcgcagtaatcccactttggctcccgctggcgggagctctcatttatgcattacgcctctatctcggcgtaccagcgcttgagttcggccacggcaacatcgtgatccaccgggccgttatccagacggtattccagcatatgcttgtaggcgcggccaatcatcggtccgggctccagacccaagagttccataatctcgttgccgtccacatcagggcgaatggcgtcgaaatcctctttcttcttgagctcgcgaacacgcgcctccatctcatccatcgcctgggagaacaccatcgccttgcgcttgttctgcgtagtggcatccgcgcgagtgagtcggtttagacgctcatacaaatgcccggcatccttgacataacggcgcacggcagaatcggtccacggctcatccacgtacccgtggaaacgcaggtgcaggttcaccagttccgagacgtcctccaccagatgatgatcgaatcgcagagccttcaaacgcttgcgggtcattttggcacccaccgcatcatgatgatggaagctcaccttgcctcccggctcgaaacgtcgggtcttcggcttgccgatatcatgcatcactgcggccagacgcaacgtgaggtcaggagcgggcaccgggccatccgggccggtttccagagcgatggcccgttcaagcacgatcatcgtgtgctcaaagacatctttgtgccgatgatgctcgtcaatctgcaactgcaacgccggaatctcggggaacacgatatccgccagacctgattcgaccagtgcttccagccctgcgcgaggacggtcagacaacagcatcttggtcagttcatcacgtacgcgctcggcggatacaatctcaatgcgatcgcgcatcgaggaaatcgcctccgcagcatcgggagcaatggaaaagcccagctgagccacgaatcggaccgcacgcatcatacgcagaggatcatcatcgaatgactggctcggatcaacaggagtacgcagcacgcctttggccaaatcgctggcaccgccgaacggatcaacgaattccagatcgggcacacgcagggccatggcgttgacggtgaagtcgcggcgtgagaggtcaccttcaagcgtgtcgccataattgacttcaggcttgcgcgaatccggatcgtaggtatccgaccgataggtggtcacctcaaccttgacctcggtgccgtccgcacgccggcgcatggcacccaacgtaccgaacttgcggcccatatcccaaaaaccgtcatgcccccaacggcgcagaatgggctcgaactgttccgggcgcgcggatgagcagaagtccagatcgtggctcttgcggtgcaggagcagatcgcggaccgggccgccgaccaatgccagctcataaccctgttcggcaaacagtcgaccgagttcgatggcctcgggccacacttcgaaatccaatgggcaccttcccgtatgtgacatttttctgccttaccagcataccgttaccccacctgcacacggggttgagtaaggtggagaatatgattacgcccgccgatcttgcccgcatgcttgggcaaacacccgattcgacggataaccatacccaagaccagctgctgtatacgtctcaaactccgcaaaattccgccgattccaagcaatccgacgacaccgtggacaacgtagccggcactgacacgcagtcggctgaccatgccgatgaaaccgccgaggtcagcaccgagcattccatgccgacgccggcaaccgtgtttggcatgcatgccacggttaccatcgccacctccagtgaaaccatcgaggggcaagccgacggcattgatagcgaggccgaaaccgaatcgatcgcgcagagcagcatcgaaaccgagacatcacccgctccgattcgtcaggaaccatcgcagcccattcatgcccaaaccgggccgacgccggccaccgtattcggccgacgcgccgccgacacaacaccgactcccactggcccgacaccggccatgatgccgcaacgccgcacttccgacggccccaccacgtttgcgtccctggatgcacaggaactaccggtggtacgcgaatattcggctggcggactgatcttcgacgatcagaatcgcgtggccatcatcgcccgtcattctcgttccggccatctggaatggtgcctgcccaaggggcatatcgagaagggcgagactccacagcagaccgccgtgcgtgaagtgcacgaggaaaccggcattttgggcgaggtcatcgattccatcgccaccatcgactactggttcaccggaaccacgcagcgcgtgcacaagctggtgcatcactatgccttgcggcagaccggcggtgagctcaccgtggaaggcgatccggatcatgaagccgaagacgccatctgggtgcggttcgatgatttggacgacgtgctgagctaccccaacgagcgcaaaatcgcgtggctatacgccagaaagaagaacaggcaggcaaacgagtgaacctacccgcagtcttatgccgctcacgccatggtggacgattcgtacgcgcgtttgcggccattcttgtcatcacggcgatgctggccgccccactgaccgcatatgccgatgattcgcctgatgatcaggccggtcagaccatcgccatcgagcagagtacgcccatagtcaccgcttcttccggattccatatcacggtagcgattaccaatgcctcatcggatacggcaccggcggggtcactgattctcagcacaaattcacggttcacattcgtctcacgcactgatatgcagaaatgggcggaaggcgataccgccattcccaccccggatgtgctcggcagcattgatgttcctgaaatcacgccgggcaacactgcaaccgtcaccctcgacgtggcggccgaccagcaggttctgcagagtatgcgcagctggggtcccaagcccctgcagttgtcgtacagcgccggaaaccagccgccaaccatgctccccagcttcctgacccgttctcctgacgggctcgacaccgcgcagactccggcgatgaacctcaccgtggcgatgccgctgaccaccactgactggcaggttgattcctccgcgctgtccggccttgtctccgaagatgagaatgcatccgcagagccggtgttatcggtgaaccagcaggaaaccaccacggtcaaggaactcaaccagaccttggccaaacaccatagcctgcaagtggtggccgatccgttgtatttccaggaactcccctccgataccagacctgccgtcgcgggagtcatgcaacccggtgattttgatgtcacggcgtatgcggcgctgaacgatgccgatgcctataccagagccggcatcgccgacgaagcatggaacgccgaacaagcgcagacgttgtatgctgtggccaaatccaccgtcacgccgactgccacctatgcctggcagggatccggcacgtggagcctggacgccctgaccaaggcccgagctcagggatataccgccgttattgcggattccacgtttgacggtgagcaaaccgacaccgtgcataccggcacctatgtggtcaatacctccgccggagacatcaccgtgctcaaggaacagtcggaactcggcacgttggcgcatggcaaggccaccagcgcacgggcaacggccgaagccagcgatgcgggcaggctggccagaatgctcgcacaaagcgcgttctatcaaatggaacagccgtatgccacccgaaacctgctgatgaccttctccaggaatagcagcgcgtcatggatcaatcaggtcatgagcgctatggaacaggcatcgtggctgaatctgactgatctgaacaccatggccgctgccgacccatacaacgtcagcagcgaggtgaaccaggacgactccaatgccgccgacgtctcccaaacccgtgccaccctggagcagcttgcttcaagtcgtaaggacatcctgcggctcgccacttccatactgaagaagggtcttgatgaagacgatgtctcatcgttgaacccgcaggcacttgcccgtcaagatgccagttcaaccgccagccacaccaatgatcccgcacaatgggtgagcacgctgttgaacgcgcatgacgacatcgctctgcatgcgttcgccggctccagcgatgccgagtatcagagccagatagccaaagccaaccggatgttcgccgatacggtgttgggcagcgtgtacatcaccccatccgaatcggtgtcggtattcagcgaatcggcccagatgccggtgacagtaagcaataagctgccttacgccgtcagcgtcaaggtcaattcgatcaccgattccatgcaaatcgtgacctcccgttccaatgatgttgtgattcccgcacgtagtgaggctcaggtgaccttcaccatccgtgtgtccacttccggcaccaccgtcgcacatgtgtcgttggccgatcggcacaacaccgccttcggcaacacacaggacaccaccatcaccagtgtgctgcgcatcagcgatgccagtggtttcgtcatcattggttttgcagtactgctgggcctcgttggtttatggcgccagttcaaccgtaagaaggatcctgacgaatgagttctaccgtaggccgcaattccctgattatggcctccggtaccgcggcttctcgcgtgaccggccaaatccgcactattttgctggcggcagccatcggcactaccggtctggcggccaatgcctatcaggccggtgcgatgattccgcaaaccgtgttcacactggtgtccggcggtattttcaatgccgtgctggtgccgcaaatcgtgcgcacgttgaaggagagggacgctcaggagcgactgaaccgactgatcaccctggccatcggcattctgctggccgtcaccgtggtgatggccgcagccacaccgctgctggcgcgtctgtacgtgggcagcagcaatcatgagatgattgccctgaccactgcgttcacgctctggtgcatgccgcaggtgttcttctacggcctatacacggtgcttggtcagattctggccgccaaagatcattttgcctcctatgcgtggagttccaccggagccaacgtcatcagctgcgccggattcaccgcattcatcatgttgttcggcaaggccaacgaacagccgcttgatttctggacctcgggcaaagtggcgcttaccgcaggtacatggacgctcggcgtggcttttcaggcactgatcctgttcgtgccgttgattcgcctgggcttcaaataccgtcccagctttggcttgaccggctttggtctcaaggcgatgggacctgtggcgctgggatcgctgggtgtggtggcgattactcagatttcggatatcgtgctgacccgaatcgccacgctggccccgcagcgtgcgcatgagctcaccggagtcagtctgtacgacgttgccggcaatgctacctaccaaaacgccttcaccctgtacatcctgccgtattcgctgattgcggtatccgtctccaccgccgtattccccctcatctcgcggtcgatagcagcgcaggacttccatgcggcacgtcagcagctgggcaacgcgctgtgcaacgtggggctgctggtgctgttctttgccacggcgctggtggtctaccctgaaccgatcattcgtgcgctgctgccttcggtctcgatgaatgagaccatgctcatctcctacgccctgattccgctgtcctgcggcatccccgccatatcggctttcctgctgattcaacgtaccttctatgcctttgaggacggcctgcatccgttcctcgccgcggtattgcaatacggcttcaccacggcactcatgattgtgggcatgctggtgcttccgccgaatcagtggatcgtgggtattgcctgttccgtatccgccggtgtgctattggcgctgccgttcatgctgtttatgctgcgcaaacgattcggcggcagcctggaaggcaagccggttgtgcagacatacggcaaggcgttggcagcggccgtaatcggcggcgttgtggtctggctggcgaaaacccctgttgcagacctcttcggtgcctccatccaagagaccggcggccagatgagctggctgtccgcattgggaatctgcatcatactgactctcgtgctggccgtggtgtatatcggcgtgctctgggcactgcgcgccacacaactgaccgatgccgtccactcgataaccgcccgtttcaggcgaaaacccgccaacacatccgttgacgaaccgcaatttgaagaagacaataataatgctgatactgctgcgagcatcatgcctgaggccgatggcattcaggccagtcccacggctagaatgtcagcgatgacgaatgctgatcacatggagcctgacgagcagatgaaaccgcaattgggagatactatccttaaccgctacaccttggtgtcttcgttgcgtaaggaacccggcctcgaggcttggcaggccaatgatcgtgtgctggcaaaggattgccagctgtttctggtctccaaccgcaaggcattggacacggtcaacaccattgccggcgagcttgcggccacccgccccgagcactatgtgccggtgctgaaataccgcgtacagtccgatgtgctcattgccgtcaccgcaatggacagtggcctatccgtggccgattaccgtgccagcgccaccggcaacatactgagctacgacgccatgcgctccattcttggcgagaccgttcaggccatccgtcccatgctgaccagcactgccggcactgccatcctgactactgataccgtgcgtcttaccggctccggcatcgaaatttccgatgctccgtttgctccgatcctggcagatatgtccggaaccgatccggcaggcgatgatggcgctgagcgtcatgccgtgcgtcagcttgccgcgttgctgtatgcactgcttaccaacacgaccagccagtcgaatccgcaattcgatctgcatctgcttgggcatgatattccaagcgagttccgtgttatttgcaagcgtggcctggcattggccgatgaaggcgagcaggtcatgccgatggcctcactggccgaactggacgcactgttgggtgattggaagccgctgactaagctatcgagcactgacatcgccctgccaaccactgacggcgaatcctccatcgtcaaggtgcagctgcgacctacggacgaggccgacatcgttccgattcctgatgacattgtcaccagccagcagctgccttcactgtccatcgcggcacctgcagtggccgctggtgctgaatccgacaccaatggtcaggcagatgctcatagcattttcgacttcaatttctcgcaagcctgggaaaaggagaacctctccggcgaagacaccggagactggtacaaccgactggctccgaccaactcgaccggtaactcccggctgaccgtgccgattcccaccgcggccggcgtgcctgagcccaccgctgctgagaccaccagccgtattccgatttttgatgcttccggccgtgaaatccgccctggtgaggagtcgcagcgcgcgctggaggaagagcaggcacgtgcggcggaagtccagtccgtgccgccgagctttatcccgaaggatcatcccactggcaatgaggatgatgccctgccagacgagacgcttttcggatcgatgaccaccaaggttgttgccattatcgtggccgtgattgtggtggttgccgcagcgttctgggccatgcatgcgttgcagcgcagtggggaaaatcctgcagatgcggcgaactcttctgagaattcggaaggtaattggccggatgtcaatgtggatgatgtgccgttcggtgaggaagatggcacttcctcgtccaaggattcctctacgtcttcatctcaggagaagaccgaaaccaagacagagacggagacgaagcctaagaaggtcaccgaggataaggactcccagtcggtgcccaagccgcgtcacgagaacaacaccgcctttacggtggccagcgggaacttcctgtccaaccctgccggccagtccggttacggctaccacgtccatcttgaccagcctcatgatgtgtaccgcatgaatatcaccatccgcacatctggcggcaagggctatatccgtgccaataccacggaggatccgacccaaggcgaacaggtggccgagtttgtattcgccgagggcggtaccactgaggtgaagttcgataaggtcgtcaacacacaggatctggttctgtgggtgccgctggatagcctgccgcagaaccagctgtacattcagaaggttgaagtcttctaaaagtcgcgactatgccggcaacgtcacgctgttggcatagaggtgtctattggctttcggatgacgtatgctgaatgccattgcgccacataacgtgctgcctgccgctaccgacggcagtcggctgcagactacataatagacactgtgtctaattattggagtgagcactgcacttcataacggactgaggggaatcatatggaacataacgtcatcatcatcggctcaggtcccgctggatacacagcggccatctaccttggtcgcgccggattgaatcctgtactggtcaccggtgctctggcccctggcgggcaactggtgaacaccacggaagtggagaatttccctggtttccctgatggcattatgggtcctgatttgatggatcgcatgcgcgatcaggctgagaaattcggcacgcagttcattgccgatgatgtcgaatccgtggaacaggtggaggccgcagatgccgttgacgcaccgcagccccggtaccgactgagcctatctgacggctcggtgttggaatctcgtgccattattgtggccaccggctcgaatttccgtaagcttggcgtacctggcgaacgcgaactttccggtcatggagtgtcgtactgcgccacttgtgacggtttcttctttaaggacaagcccattgtggtggtcggcggcggtgattcggcgtttgaagaagcactgttcctgaccagatttggctcatcagtcacgctgattcatcgtcgtgattcgttccgcgcctcccagatcatggtggaccgcgcacagtcgaatcccaagttgaccttgctgaccaataccgtggttaccgccatccacggaagcgcctcggaagcaaagcccgcctccccggccattaccattggcggcctgaagctgcccgcggccacggctccccaaaacgtgagcagcattgatattcgtaatacggcaaccggtgagacggggactttggataccaatgcggtattcgtggccatcggtcataccccggctaccgagttcattgccgatgtggtcagcactgatgatgatggatacatcacggttgcagaagctggtacacacaccagcgcccctggcgtttttgccgccggtgattgcgtggatcgcacctaccgacaagccattagcgcagcgggcatgggttgccgcgccgcattggatgcccagcagtatctgaccgcatagttggcagagcattactcagtaatcagatatacacaatggcgcagtacggatgaattcgtactgcgccattgtgtatatctgatatatcagacgtgatgccttacagccgtcttatctcacacccacttgccgtcggtgctggactgattgggcaccagcaactgcaggatgcggtccatatcttcaggggacgagaatacgatttcaatacggccatgtttggcgctgcccttgatggagaccttggtatcaaaatgattttccaagctctgctgaatggcggaccccatccacggattggtctttgaggtcttcggcttcttaggctgctctcccgaagcaacggccatagccacgatttcttccgtactgcgaaccgacaatccttccgcgatgatgcgagatgccagcttatccatcgcttctggatcgctcagacccagcaatgcacgcgcatggccggacgagagcacgccagcggccacttttttctgtactgttgccggcaggttcaacagacgaagtgtattggcaatttgaggacgtgattttgaaatcgatttcgacagctgcgcctgagtcaggccaaactcctcaatcatctgctgatatgcggctgcttcttccagaggattcaatgccacacgatgcaaattctccagcaaggcatcacggagcatatcgtcgtccgtggtggtcttcacgatggctggaatcgtggtcaatccagccagctgagaagcgcgccagcggcgttcgcccatgatcagttcataggggctgtccagatggccagtgaacgggttcgttgaggactgctcgctgtgttgtgcttgcttggcctcggcaatctgctcgctgggacggcggcgcaccacgatgggttgcaatacacccacttctttgatggaagcggcaagctcattgagttcgtcttcgtcgaaaatcgtacgcggctgatgcgcattggggccgatttcctgcaaactgagttcagcaagatagccgccctcaacagacttcagttcctctggagcctcttgtttgttggccttatcctcagccacatgcttgttcttcggtgtttcacgtgaaacattgctcaatgatttcgttgcggctcgagtggttggcttatcgtcactgccgaagaataggtcactcggatgtgcgatatcatccaacgcaggcatggccgctcgcttgccaccagttttcttggcagcagctcccttcttgggctgtgatggagtcgttgcggtcttggacttaggcttcaccgcttcatctggcgccttcgcaggctccgcgggatcctcctcccctggcaatgcagggaataacgcgccaagtcctttaccgagtcgtgatttggttgccattacttcctcctcgcatcaatggcttcaagcacatgctgtgaacgtcgagcgatttccaatgccgcttcgccatatgctatggcacctatgccgcggggatcatagacaataacaggctgtgaaaagctcggagcttccgatatcttcaccgatcggggaacggtggtatccaggacaatattggggtaatgggacttgacctcaccataaacctcacggcttaacagtgtacggcggtcgaacatcgtaaccagcatggtggagaccagcagaaccggattgaaatgctgctgcaccaggccgatagtgttaatcagctggcccaatccctccagcgcatagtattcggcttgaatgggaatcaacatctcagtgaccgcgcacatggcgttaattaccagcaaacccaagctcggaggacaatcgatgaacacgtaatcgtacgcagtatctgtctgttctagaaaacgatcgagcgcttctttcagcaacgtgttacgattcggtaagtccgccacttcaagttcggcaccgctcaaatcgatggacgcaggaaccacatcgagcgaaggaaaatcagcgcttgtcgtgatgacatccgcgatttccgcccgcccctcaattacatcataaatcgacctatctcctgaagaatgtgaaacagcaaatgccgttgacgcattaccctggggatccatatcaatgaccaacacatgcgctccgtgctgagccagcgctgcggcaaggtttaccgtcgacgtggtcttaccgacgccgcctttctgattggccacggcgatcaagcgtgtccgtttcggcttgggaaaggaggcatgggtcaaagcgtcatatcgggagctttcgtcggccatctgactacccagcgcagaactctgcccatcaaaaatacgacggagggtttcggaaggcgattccatcattgtgtcatgatgatcgtctgctgtcatcgttcctccttattcaatgtacattccagtgttcctattcgtatggacatgatttgtgttatccacatcccctatcccctattgtggataagtgtggacaagtggataaccacaacggtcacatctacaatccaccatcgcaaaagtgaggtttttcaacggttttcaccgatacccaccataggggatagagttgtggataactcaattcatgaagtacgaatgtggataacttcaacatcggtaccatcatcaacgtttgtcaacaattaccacatgtgtcggttccagacctggaccgacctccgcttccaccactcggggacgacggccaccatagcgtgaaatctggccactggctttgtccagttccgcttgtgccgaacgacccttgagcgcaataagccgaccggtgggtttcagcagaggcaatgtccatccagaaagcttggtcatcggtgccactgcacggcaggtcaccactgcaaaaggatgcatctcgcgcttgcgaaccctattgatcacttcatcggaacgaccacggataatagatacattcttcaaccccatcagatcaacgcactcggcaagccattcaacacggcgttccatcggttcaatcagcgtaaaactgcactccggcaagcaacacgccgtcaccagcccagggaaacctccaccactgccaacgtcagcaacggttctaaaacgagctccatctgtggcctcgcgcacataaggaactatcgctgcggaattgagaatgtgacgttcccaaataatgtccacatcacgaggtccaatcaagccgcgaggttctccctcttgggaaagcttgtcatggaatctctctaatcggggtaaagcatcccccaatacacgggccagcaccggcgattcctgtaactcatccaccatgacagtcccctcctatgtttcacgtgaaacatgtggcataacttgaggcgccgcttataacgacgcctcacatatcaccgcacagaaaacttcagcatatacctttgtggtgcaggtgtatactcactcctgatcgtcgacctcttcttcttcgacgttatcttcgttcttgttacgaagatatacggtcacataacgatgcggttcttcaccatgggagcgagacttcagaccttcatcacgcaccacgtcatgaacgactttacgctcaaaggaattcatcggcttcagatccatcggttcgccgctctccttaacggcatcaatagcatcgagagccacatcgcggagatgctggcgcttacgcttcagaaaaccatccacgtccacaatcaggtgggaacgttcgccggtcttctgctgcacagccagacgagtaagctgctgcaacgcatcaaccacttcgccattgcgaccaatcagatgtttgatgtccgtatcgtcatcagcgacgatctgaacagttgggcggttgttacgaacacccatttcgatatcgccctcatagtcggcgatatccagcaagccttcaaggtaatcggcagcgatgtcagcctcttcgttgagctgatcaatcgacttcacgtcatcctgtgccatacgctactccttcatgtcaggtctgattctcaagtctaagccctgctcccccgaacaggattggttagtgtcggggcgtgtccgatgtttcacgtgaaacatcggacatgccccccgtcctcattatttctttttgcgcttacgaaccggctgttgcctctggaatccttggctcgccttacgcgcggcttcttccttagccttagccaaagcctcctcttcaagggaaggaagaccggccttttcacgacgagcattctcgttgcgatggtcacgcttttccttatcttctgcggcaggagaacctggagtcgggaagcaatacacctgccacagcgtacggcacaagttgcaaacgttgttggtcagccagtacaccaacacggcgaacgggaaggaagcacccgagaagatgtacatcaccgggaagagccacagcatggccttctgcatggtctcggtctgcttgttcatcgaagcagctgccatgttgcgcttcatgttgatgtactgcatgagccacaagcagaagcacatcaggaacacaaagacaccgatgaccaccttgccggcagtagctgcgcgggtgaagttatcggtcacactgacaatgccgaacacatcggtctgggtgaactgcttggcggtgtccacatcaaaggcaccgagcggatctcgcttgccgttggcgatgtatggaatggcggacagcgtgtagaacatggacatgaacaccgggccctgaatgagcatcggcaggcaggaacctgccggattgacgttattgtcctggtatagtttcatggtctcacgactcatggcttccttggaagcctgatccgtcttgcccttgtacttgttctgaatgcgctgcatcttcggcgccaatgcctgcatcttgcgcatcgacttcatctgcttgtagaacagcgggaagatacacgcctgcaccaccagcacaaggatgataatggcaagaatccaggagacgccgaccgggctcatgcccaacatgacaaagaagtcatgcacgatcttcatgatccaagtctgcagccactcaataggggtcagaatcttgtacaggaatccccagaacccgctatccagcaggaattggttttgattgatcatcgttgggcctctctttgggttgtggccaatggcgtcagtcgaggctcctcatgagccttcgaccacgaaaatcgataaaaaatggaataacgctgcggcacgtcgtcaattcccccacggctccacggcctgcaacgaagcaatcgcaatacggcaagcactccgcctttgcaagcgccataccgttcaaaagcctcaatggcatagtttgaacatgttgggtaatacttgcaacagggcggtcggttcgcagaaatgtgacgctggtaccaacgcacaccacgaatcattaccgccctgatggaagtagacatgtgtcattccgccttacgagccactttggcaaagccggtggcaaactgctcatccaacgatgagaacgatgcggatgccgcacttggttttgcgcgcaccacgatatcgcagtaaggcggcaggctctcttcatgagccttagccagaaccctgaacctgcgcttcaccgtattacgggtaaccgcattgcccaccgatttggagacagccaaacccagacgacgatacgtcgtccgatcatcagattgatgatcattacgcatcaggtaatgcacaatgatgtctttgccacccactttgcgccggcgtttaagtacggcaacgaaatcacgatggctttgcagccgctccacctcgacagcctcgaggaactgatccgagggatcaggcggacaggctcttgcggcccttggcgcggcgacggttaatcagcgcgcgaccggaacgagtgcgcatacgcacacggaaaccgtgcttcatgtgacgacgacggttgttcggctggaacgtcctcttcatatcaattgctcctaggtctatttggcaacgcttcgcgctgccctcacgtgagtcaagctataccaacctactctgacccctaccctcaagtcaaaatacgtcaagagttttcacatttcgacacgtcgaggaaagctcggttcacctctttgaatcggcataaactcaaccatttcaccccaaaagttatccacaaattacatgtatgttattcacatttgagcaattccaacacgcgactcggtggataacttcctcacatcggagtaaacattatctacgtaattcattcgttgagtagttcagaaggggccgacc
